(19) United States
(12) Patent Application Publication
(10) Pub. No.: US 2019/0153495 A1
(43) Pub. Date: May 23, 2019

(54) PRODUCTION OF STEVIOL GLYCOSIDES IN RECOMBINANT HOSTS

(71) Applicant: EVOLVA SA, Reinach (CH)

(72) Inventors: Kim Olsson, Copenhagen (DK); Joseph Michael Sheridan, Royston (GB); Laura Tatjer Recorda, Copenhagen (DK); Christian Nyffengger, Hvidovre (DK); Veronique Douchin, Frederiksberg (DK)

(73) Assignee: EVOLVA SA, Reinach (CH)

(21) Appl. No.: 16/098,347

(22) PCT Filed: May 16, 2017
(86) PCT No.: PCT/EP2017/061775

§ 371 Date: Nov. 1, 2018

Related U.S. Application Data
(60) Provisional application No. 62/337,190, filed on May 16, 2016.

(51) Int. Cl. C12P 19/56; C12N 9/10

(52) U.S. Cl. CPC C12P 19/56; C12N 9/1051

(57) ABSTRACT

The invention relates to recombinant microorganisms and methods for producing steviol glycosides, glycosides of steviol precursors, and steviol glycoside precursors.

### BACKGROUND OF THE INVENTION

### Field of the Invention

[0001] This disclosure relates to recombinant production of steviol glycosides, glycosides of steviol precursors, and steviol glycoside precursors in recombinant hosts. In particular, this disclosure relates to production of steviol glycosides comprising steviol-13-O-glucoside (13-SMG), steviol-19-O-glucoside (19-SMG), steviol-1,2-bioside, steviol-1,3-bioside, 1,2-stevioside, 1,3-stevioside, rubusoside, Rebaudioside A (RebA), Rebaudioside B (RebB), Rebaudioside C (RebC), Rebaudioside D (RebD), Rebaudioside E (RebE), Rebaudioside F (RebF), Rebaudioside M (RebM), Rebaudioside Q (RebQ), Rebaudioside I (RebI), dulcoside A, mono-glycosylated ent-kaurenoic acids, di-glycosylated ent-kaurenoic acids, tri-glycosylated ent-kaurenoic acids, mono-glycosylated ent-kaurenols, di-glycosylated ent-kaurenols, tri-glycosylated ent-kaurenols, tri-glycosylated steviol glycosides, tetra-glycosylated steviol glycosides, penta-glycosylated steviol glycosides, hexa-glycosylated steviol glycosides, hepta-glycosylated steviol glycosides, or isomers thereof in recombinant hosts.

### Description of Related Art

[0002] Sweeteners are well known as ingredients used most commonly in the food, beverage, or confectionary industries. The sweetener can either be incorporated into a final food product during production or for stand-alone use, when appropriately diluted, as a tabletop sweetener or an at-home replacement for sugars in baking. Sweeteners include natural sweeteners such as sucrose, high fructose corn syrup, molasses, maple syrup, and honey and artificial sweeteners such as aspartame, saccharine, and sucralose. Stevia extract is a natural sweetener that can be isolated and extracted from a perennial shrub, Stevia rebaudiana. Stevia is commonly grown in South America and Asia for commercial production of stevia extract. Stevia extract, purified to various degrees, is used commercially as a high intensity sweetener in foods and in blends or alone as a tabletop sweetener.

[0003] Chemical structures for several steviol glycosides are shown in FIG. 1, including the diterpene steviol and various steviol glycosides. Extracts of the Stevia plant generally comprise steviol glycosides that contribute to the sweet flavor, although the amount of each steviol glycoside often varies, inter alia, among different production batches.

[0004] As recovery and purification of steviol glycosides from the Stevia plant have proven to be labor intensive and inefficient, there remains a need for a recombinant production system that can accumulate high yields of desired steviol glycosides, such as RebD and RebM. There also remains a need for improved production of steviol glycosides in recombinant hosts for commercial uses. As well, there remains a need for identifying enzymes selective towards particular substrates to produce one or more specific steviol glycosides. In some aspects, there remains a need to increase the catalytic capability of enzymes with 19-O glycosylation activity in order to produce higher yields of steviol glycosides.

### SUMMARY OF THE INVENTION

[0005] It is against the above background that the present invention provides certain advantages and advancements over the prior art.

[0006] Although this invention as disclosed herein is not limited to specific advantages or functionalities, the invention provides a recombinant host cell capable of producing one or more steviol glycosides and/or glycosylated steviol precursors, or a composition thereof, comprising:
[0007] (a) a gene encoding a polypeptide capable of glycosylating steviol or a steviol glycoside at its C-19 carboxyl group, having at least 55% sequence identity to the amino acid sequence set forth in SEQ ID NO:4, and further having at least one amino acid substitution corresponding to residues 79, 80, 81, 83, 184, 260, 286, or 377 of SEQ ID NO:4;
[0008] (b) a gene encoding a polypeptide capable of glycosylating steviol or a steviol glycoside at its C-19 carboxyl group, having at least 55% sequence identity to the amino acid sequence set forth in SEQ ID NO:4, and further having at least one amino acid substitution corresponding to residues 68, 69, 70, 71, 72, 73, 74, 75, 76, 77, 78, 79, 80, 81, 82, or 83 of SEQ ID NO:4;
[0009] (c) a gene encoding a bifunctional polypeptide capable of glycosylating steviol or a steviol glycoside at its C-19 carboxyl group and glycosylating steviol or a steviol glycoside at its C-13 hydroxyl group, having at least 50% sequence identity to the amino acid sequence set forth in SEQ ID NO:132, SEQ ID NO:134, SEQ ID NO:136, SEQ ID NO:138, SEQ ID NO:140, or SEQ ID NO:142, SEQ ID NO:144, SEQ ID NO:146, or SEQ ID NO:148; and/or
[0010] (d) a gene encoding a tagged polypeptide capable of glycosylating steviol or a steviol glycoside at its C-19 carboxyl group, having at least 55% sequence identity to the amino acid sequence set forth in SEQ ID NO:174, SEQ ID NO:176, SEQ ID NO:178, or SEQ ID NO:180;

[0011] wherein at least one of the genes is a recombinant gene; and

[0012] wherein the recombinant host cell is capable of producing a glycoside of ent-kaurenoic acid, ent-kaurenol, or steviol.

[0013] In one aspect of the recombinant host cell disclosed herein, the polypeptide capable of glycosylating steviol or a steviol glycoside at its C-19 carboxyl group comprises a M79V, M79E, S80C, A81W, E83K, H184V, H184T N260T, K286C, K286E, K286N, K286T, and/or S377Q amino acid substitution corresponding to SEQ ID NO:4.

[0014] In one aspect of the recombinant host cell disclosed herein, the polypeptide capable of glycosylating steviol or a steviol glycoside at its C-19 carboxyl group comprises:

[0015] (a) a K286C substitution corresponding to SEQ ID NO:4;

[0016] (b) a M79V substitution corresponding to SEQ ID NO:4;

[0017] (c) a S377Q substitution corresponding to SEQ ID NO:4;

[0018] (d) a S800 substitution corresponding to SEQ ID NO:4;

[0019] (e) a N260T and a K286C substitution corresponding to SEQ ID NO:4;

[0020] (f) a H184V substitution corresponding to SEQ ID NO:4;

[0021] (g) a A81W and a E83K substitution corresponding to SEQ ID NO:4;

[0022] (h) a A81W substitution corresponding to SEQ ID NO:4;

[0023] (i) a H184T substitution corresponding to SEQ ID NO:4;

[0024] (k) a K286N substitution corresponding to SEQ ID NO:4;

[0025] (l) a M79E substitution corresponding to SEQ ID NO:4; or

[0026] (m) a K286T substitution corresponding to SEQ ID NO:4.

[0027] In one aspect of the recombinant host cell disclosed herein, the polypeptide capable of glycosylating steviol or a steviol glycoside at its C-19 carboxyl group further comprises a tag.

[0028] In one aspect of the recombinant host cell disclosed herein, the tag comprises a tag sequence having at least 90% identity to disulfide oxidoreductase of SEQ ID NO:152, maltose binding protein of SEQ ID NO:153, N-utilization substance of SEQ ID NO:154, or small ubiquitin-like modifier of SEQ ID NO:155.

[0029] In one aspect of the recombinant host cell disclosed herein, the polypeptide capable of glycosylating steviol or a steviol glycoside at its C-19 carboxyl group comprises a polypeptide having at least 55% sequence identity to the amino acid sequence set forth in SEQ ID NO:174, SEQ ID NO:176, SEQ ID NO:178, or SEQ ID NO:180.

[0030] In one aspect of the recombinant host cell disclosed herein, the recombinant host cell further comprises:
[0031] (a) a gene encoding a polypeptide capable of synthesizing geranylgeranyl pyrophosphate (GGPP) from farnesyl diphosphate (FPP) and isopentenyl diphosphate (IPP);
[0032] (b) a gene encoding a polypeptide capable of synthesizing ent-copalyl diphosphate from GGPP;
[0033] (c) a gene encoding an a polypeptide capable of synthesizing ent-kaurene from ent-copalyl diphosphate;
[0034] (d) a gene encoding a polypeptide capable of synthesizing ent-kaurenoic acid from ent-kaurene;
[0035] (e) a gene encoding a polypeptide capable of reducing cytochrome P450 complex;
[0036] (f) a gene encoding a polypeptide capable of synthesizing steviol from ent-kaurenoic acid;
[0037] (g) a gene encoding a polypeptide capable of glycosylating steviol or a steviol glycoside at its C-13 hydroxyl group thereof;
[0038] (h) a gene encoding a polypeptide capable of beta 1,3 glycosylation of the C3′ of the 13-O-glucose, 19-O-glucose, or both 13-O-glucose and 19-O-glucose of a steviol glycoside;
[0039] (i) a gene encoding a polypeptide capable of glycosylating steviol or a steviol glycoside at its C-19 carboxyl group thereof; and/or
[0040] (k) a gene encoding a polypeptide capable of beta 1,2 glycosylation of the C2′ of the 13-O-glucose, 19-O-glucose, or both 13-O-glucose and 19-O-glucose of a steviol glycoside;

[0041] wherein at least one of the genes is a recombinant gene.

[0042] In one aspect of the recombinant host cell disclosed herein:
[0043] (a) the polypeptide capable of synthesizing GGPP comprises a polypeptide having at least 70% sequence identity to the amino acid sequence set forth in SEQ ID NO:20, SEQ ID NO:22, SEQ ID NO:24, SEQ ID NO:26, SEQ ID NO:28, SEQ ID NO:30, SEQ ID NO:32, or SEQ ID NO:116;
[0044] (b) the polypeptide capable of synthesizing ent-copalyl diphosphate comprises a polypeptide having at least 70% sequence identity to the amino acid sequence set forth in SEQ ID NO:34, SEQ ID NO:36, SEQ ID NO:38, SEQ ID NO:40, SEQ ID NO:42, or SEQ ID NO:120;
[0045] (c) the polypeptide capable of synthesizing ent-kaurene comprises a polypeptide having at least 70% sequence identity to the amino acid sequence set forth in SEQ ID NO:44, SEQ ID NO:46, SEQ ID NO:48, SEQ ID NO:50, or SEQ ID NO:52;
[0046] (d) the polypeptide capable of synthesizing ent-kaurenoic acid comprises a polypeptide having at least 70% sequence identity to the amino acid sequence set forth in SEQ ID NO:60, SEQ ID NO:62, SEQ ID NO:117, SEQ ID NO:66, SEQ ID NO:68, SEQ ID NO:70, SEQ ID NO:72, SEQ ID NO:74, or SEQ ID NO:76;
[0047] (e) the polypeptide capable of reducing cytochrome P450 complex comprises a polypeptide having at least 70% sequence identity to the amino acid sequence set forth in SEQ ID NO:78, SEQ ID NO:80, SEQ ID NO:82, SEQ ID NO:84, SEQ ID NO:86, SEQ ID NO:88, SEQ ID NO:90, SEQ ID NO:92;
[0048] (f) the polypeptide capable of synthesizing steviol comprises a polypeptide having at least 70% sequence identity to the amino acid sequence set forth in SEQ ID NO:94, SEQ ID NO:97, SEQ ID NO:100, SEQ ID NO:101, SEQ ID NO:102, SEQ ID NO:103, SEQ ID NO:104, SEQ ID NO:106, SEQ ID NO:108, SEQ ID NO:110, SEQ ID NO:112, or SEQ ID NO:114;
[0049] (g) the polypeptide capable of glycosylating steviol or a steviol glycoside at its C-13 hydroxyl group thereof comprises a polypeptide having at least 55% sequence identity to the amino acid sequence set forth in SEQ ID NO:7;
[0050] (h) the polypeptide capable of beta 1,3 glycosylation of the C3′ of the 13-O-glucose, 19-O-glucose, or both 13-O-glucose and 19-O-glucose of a steviol glycoside comprises a polypeptide having at least 50% sequence identity to the amino acid sequence set forth in SEQ ID NO:9;
[0051] (i) the polypeptide capable of glycosylating steviol or a steviol glycoside at its C-19 carboxyl group thereof comprises a polypeptide having at least 55% sequence identity to the amino acid sequence set forth in SEQ ID NO:4; and/or
[0052] (k) the polypeptide capable of beta 1,2 glycosylation of the C2′ of the 13-O-glucose, 19-O-glucose, or both 13-O-glucose and 19-O-glucose of a steviol glycoside comprises a polypeptide having 80% or greater identity to the amino acid sequence set forth in SEQ ID NO:11; a polypeptide having 80% or greater identity to the amino acid sequence set forth in SEQ ID NO:13; or a polypeptide having at least 65% sequence identity to the amino acid sequence set forth in SEQ ID NO:16.

[0053] In one aspect of the recombinant host cell disclosed herein, expression of the one or more recombinant increases an amount of the one or more steviol glycosides and/or glycosylated steviol precursors, or a composition thereof accumulated by the cell relative to a corresponding host lacking the one or more recombinant genes.

[0054] In one aspect of the recombinant host cell disclosed herein, expression of the one or more recombinant genes increases the amount of the one or more steviol glycosides and/or glycosylated steviol precursors, or the composition thereof, accumulated by the cell by at least about 5%, at least about 10%, at least about 25%, at least about 50%, at least about 75%, or at least about 100% relative to a corresponding host lacking the one or more recombinant genes.

[0055] In one aspect of the recombinant host cell disclosed herein, expression of the one or more recombinant genes increases the amount of ent-kaurenoic acid+3Glc (isomer 2), ent-kaurenol+2Glc (#8), ent-kaurenol+3Glc (isomer 1 and/or isomer 2), steviol-13-O-glucoside (13-SMG), steviol-19-O-glucoside (19-SMG), steviol-1,2-bioside, steviol-1,3-bioside, rubusoside, 1,2-stevioside, Rebaudioside A (RebA), Rebaudioside B (RebB), Rebaudioside E (RebE), steviol+4Glc (#24 and/or #25), steviol+4Glc (#26), steviol+4Glc (#33), Rebaudioside D (RebD), steviol+5Glc, Rebaudioside M (RebM), steviol+6Glc (#23), steviol+7Glc (isomer 2), and/or steviol+7Glc (isomer 5) accumulated by the cell relative to a corresponding host lacking the one or more recombinant genes.

[0056] In one aspect of the recombinant host cell disclosed herein, expression of the one or more recombinant genes decreases the amount of the one or more steviol glycosides and/or glycosylated steviol precursors, or the composition thereof accumulated by the cell relative to a corresponding host lacking the one or more recombinant genes.

[0057] In one aspect of the recombinant host cell disclosed herein, expression of the one or more recombinant genes decreases the amount of the one or more steviol glycosides accumulated by the cell by at least about 5%, at least about 10%, at least about 25%, or at least about 50% relative to a corresponding host lacking the one or more recombinant genes.

[0058] In one aspect of the recombinant host cell disclosed herein, expression of the one or more recombinant genes decreases the amount of ent-kaurenoic acid+2Glc (#7), ent-kaurenoic acid+3Glc (isomer 1), ent-kaurenoic acid+3Glc (isomer 2), 19-SMG, 1,2-stevioside, RebA, steviol+4Glc (#26), RebD, steviol+5Glc (#24), steviol+5Glc (#25), steviol+6Glc (isomer 1), RebM, steviol+7Glc (isomer 2), and/or steviol+7Glc (isomer 5) accumulated by the cell relative to a corresponding host lacking the one or more recombinant genes.

[0059] In one aspect of the recombinant host cell disclosed herein, the one or more steviol glycosides and/or glycosylated steviol precursors are, or the composition thereof comprises, 13-SMG, 19-SMG, steviol-1,2-bioside, steviol-1,3-bioside, 1,2-stevioside, 1,3-stevioside, rubusoside, RebA, RebB, RebC, RebD, RebE, Rebaudioside F (RebF), RebM, Rebaudioside Q (RebQ), Rebaudioside I (RebI), dulcoside A, a mono-glycosylated ent-kaurenoic acid, a di-glycosylated ent-kaurenoic acid, a tri-glycosylated ent-kaurenoic acid, a mono-glycosylated ent-kaurenols, a di-glycosylated ent-kaurenol, a tri-glycosylated ent-kaurenol, a tri-glycosylated steviol glycoside, a tetra-glycosylated steviol glycoside, a penta-glycosylated steviol glycoside, a hexa-glycosylated steviol glycoside, a hepta-glycosylated steviol glycoside, and/or an isomer thereof.

[0060] In one aspect of the recombinant host cell disclosed herein:
[0061] (a) the di-glycosylated ent-kaurenoic acid comprises KA2.7 of Table 1;
[0062] (b) the tri-glycosylated ent-kaurenoic acid comprises KA3.1 or KA3.2 of Table 1;
[0063] (c) the di-glycosylated ent-kaurenol comprises KL2.8 of Table 1;
[0064] (d) the tri-glycosylated ent-kaurenol comprises KL3.1 or KOL3.2 of Table 1;
[0065] (e) the steviol glycoside comprises 13-SMG, 19-SMG, steviol-1,2-bioside, steviol-1,3-bioside, rubusoside, RebA, RebE, RebD or RebM;
[0066] (f) the tetra-glycosylated steviol comprises Compound 4.26 or Compound 4.33 of Table 1;
[0067] (g) the penta-glycosylated steviol comprises Compound 5.24 or Compound 5.25 of Table 1;
[0068] (h) the hexa-glycosylated steviol comprises Compound 6.1 or Compound 6.23 of Table 1; and/or
[0069] (i) the hepta-glycosylated steviol comprises Compound 7.2 or Compound 7.5 of Table 1.

[0070] In one aspect of the recombinant host cell disclosed herein, the recombinant host cell comprises a plant cell, a mammalian cell, an insect cell, a fungal cell, an algal cell, or a bacterial cell.

[0071] The invention also provides a method of producing a one or more steviol glycosides and/or glycosylated steviol precursors, or a composition thereof in a cell culture, comprising growing the recombinant host cell disclosed herein in the cell culture, under conditions in which the genes are expressed, and wherein the one or more steviol glycosides and/or glycosylated steviol precursors, or the composition thereof is produced by the recombinant host cell in the cell culture.

[0072] In one aspect of the method disclosed herein, the genes are constitutively expressed and/or expression of the genes is induced.

[0073] In one aspect of the method disclosed herein, the amount of ent-kaurenoic acid+3Glc (isomer 2), ent-kaurenol+2Glc (#8), ent-kaurenol+3Glc (isomer 1 and/or isomer 2), 13-SMG, 19-SMG, steviol-1,2-bioside, steviol-1,3-bioside, rubusoside, 1,2-stevioside, RebB, RebA, RebE, steviol+4Glc (#24 and/or #25), steviol+4Glc (#26), steviol+4Glc (#33), RebD, steviol+5Glc, RebM, steviol+6Glc (#23), steviol+7Glc (isomer 2), and/or steviol+7Glc (isomer 5) accumulated by the cell is increased by at least about 5% relative to a corresponding host lacking the one or more recombinant genes.

[0074] In one aspect of the method disclosed herein, the amount of ent-kaurenoic acid+2Glc (#7), ent-kaurenoic acid+3Glc (isomer 1), ent-kaurenoic acid+3Glc (isomer 2), 19-SMG, 1,2-stevioside, RebA, steviol+4Glc (#26), RebD, steviol+5Glc (#24), steviol+5Glc (#25), steviol+6Glc (isomer 1), RebM, steviol+7Glc (isomer 2), and/or steviol+7Glc (isomer 5) accumulated by the cell is decreased by at least about 5% relative to a corresponding host lacking the one or more recombinant genes.

[0075] In one aspect, the method disclosed herein further comprises isolating from the cell cultures the one or more steviol glycosides and/or glycosylated steviol precursors or the composition thereof produced thereby.

[0076] In one aspect of the method disclosed herein, the isolating step comprises:
[0077] (a) providing the cell culture comprising the one or more steviol glycosides and/or glycosylated steviol precursors, or the composition thereof;
[0078] (b) separating a liquid phase of the cell culture from a solid phase of the cell culture to obtain a supernatant comprising the produced one or more steviol glycosides and/or glycosylated steviol precursors, or the composition thereof;
[0079] (c) providing one or more adsorbent resins, comprising providing the adsorbent resins in a packed column; and
[0080] (d) contacting the supernatant of step (b) with the one or more adsorbent resins in order to obtain at least a portion of the produced one or more steviol glycosides and/or glycosylated steviol precursors, or the composition thereof, thereby isolating the produced one or more steviol glycosides and/or glycosylated steviol precursors, or the composition thereof;

[0081] or
[0082] (a) providing the cell culture comprising the one or more steviol glycosides and/or glycosylated steviol precursors, or the composition thereof;
[0083] (b) separating a liquid phase of the cell culture from a solid phase of the cell culture to obtain a supernatant comprising the produced one or more steviol glycosides and/or glycosylated steviol precursors, or the composition thereof;
[0084] (c) providing one or more ion exchange or ion exchange or reversed-phase chromatography columns; and
[0085] (d) contacting the supernatant of step (b) with the one or more ion exchange or ion exchange or reversed-phase chromatography columns in order to obtain at least a portion of the produced one or more steviol glycosides and/or glycosylated steviol precursors, or the composition thereof, thereby isolating the produced one or more steviol glycosides and/or glycosylated steviol precursors, or the composition thereof;

[0086] or
[0087] (a) providing the cell culture comprising the one or more steviol glycosides and/or glycosylated steviol precursors, or the composition thereof;
[0088] (b) separating a liquid phase of the cell culture from a solid phase of the cell culture to obtain a supernatant comprising the produced one or more steviol glycosides and/or glycosylated steviol precursors, or the composition thereof;
[0089] (c) crystallizing or extracting the produced one or more steviol glycosides and/or glycosylated steviol precursors, or the composition thereof, thereby isolating the produced one or more steviol glycosides and/or glycosylated steviol precursors, or the composition thereof.

[0090] In one aspect, the method disclosed herein further comprises recovering the one or more steviol glycosides and/or glycosylated steviol precursors or the composition thereof from the cell culture, wherein the cell culture is enriched for the one or more steviol glycosides and/or glycosylated steviol precursors, or the composition thereof relative to a steviol glycoside composition from a Stevia plant and has a reduced level of Stevia plant-derived components relative to a plant-derived Stevia extract.

[0091] In one aspect of the method disclosed herein, the recovered one or more steviol glycosides and/or glycosylated steviol precursors or the composition thereof are present in relative amounts that are different from a steviol glycoside composition recovered from a Stevia plant and have a reduced level of Stevia plant-derived components relative to a plant-derived Stevia extract.

[0092] The invention also provides a method for producing one or more steviol glycosides and/or glycosylated steviol precursors, or a composition thereof, comprising whole cell bioconversion of plant-derived or synthetic steviol, steviol precursors, glycosylated steviol precursors and/or steviol glycosides in a cell culture medium of a recombinant host cell cell using:
[0093] (a) a polypeptide capable of glycosylating steviol or a steviol glycoside at its C-19 carboxyl group having at least 55% sequence identity to the amino acid sequence set forth in SEQ ID NO:4, and further having at least one amino acid substitution corresponding to residues 79, 80, 81, 83, 184, 260, 286, or 377 of SEQ ID NO:4;
[0094] (b) a polypeptide capable of glycosylating steviol or a steviol glycoside at its C-19 carboxyl group, having at least 55% sequence identity to the amino acid sequence set forth in SEQ ID NO:4, and further having at least one amino acid substitution corresponding to residues 68, 69, 70, 71, 72, 73, 74, 75, 76, 77, 78, 79, 80, 81, 82, or 83 of SEQ ID NO:4;
[0095] (c) a bifunctional polypeptide capable of glycosylating steviol or a steviol glycoside at its C-19 carboxyl group and glycosylating steviol or a steviol glycoside at its C-13 hydroxyl group, having at least 50% sequence identity to the amino acid sequence set forth in SEQ ID NO:132, SEQ ID NO:134, SEQ ID NO:136, SEQ ID NO:138, SEQ ID NO:140, or SEQ ID NO:142, SEQ ID NO:144, SEQ ID NO:146, or SEQ ID NO:148; and/or
[0096] (d) a tagged polypeptide capable of glycosylating steviol or a steviol glycoside at its C-19 carboxyl group, having at least 55% sequence identity to the amino acid sequence set forth in SEQ ID NO:174, SEQ ID NO:176, SEQ ID NO:178, or SEQ ID NO:180;

[0097] wherein at least one of the polypeptides is a recombinant polypeptide expressed in the recombinant host cell; and producing the one or more steviol glycosides and/or glycosylated steviol precursors, or the composition thereof, thereby.

[0098] In one aspect of the method disclosed herein, the recombinant host cell is a plant cell, a mammalian cell, an insect cell, a fungal cell, an algal cell or a bacterial cell.

[0099] The invention also provides an in vitro method for producing one or more steviol glycosides and/or glycosylated steviol precursors, or a composition thereof comprising adding:
[0100] (a) a polypeptide capable of glycosylating steviol or a steviol glycoside at its C-19 carboxyl group having at least 55% sequence identity to the amino acid sequence set forth in SEQ ID NO:4, and further having at least one amino acid substitution corresponding to residues 79, 80, 81, 83, 184, 260, 286, or 377 of SEQ ID NO:4;
[0101] (b) a polypeptide capable of glycosylating steviol or a steviol glycoside at its C-19 carboxyl group, having at least 55% sequence identity to the amino acid sequence set forth in SEQ ID NO:4, and further having at least one amino acid substitution corresponding to residues 68, 69, 70, 71, 72, 73, 74, 75, 76, 77, 78, 79, 80, 81, 82, or 83 of SEQ ID NO:4;
[0102] (c) a bifunctional polypeptide capable of glycosylating steviol or a steviol glycoside at its C-19 carboxyl group and glycosylating steviol or a steviol glycoside at its C-13 hydroxyl group, having at least 50% sequence identity to the amino acid sequence set forth in SEQ ID NO:132, SEQ ID NO:134, SEQ ID NO:136, SEQ ID NO:138, SEQ ID NO:140, or SEQ ID NO:142, SEQ ID NO:144, SEQ ID NO:146, or SEQ ID NO:148; and/or
[0103] (d) a tagged polypeptide capable of glycosylating steviol or a steviol glycoside at its C-19 carboxyl group, having at least 55% sequence identity to the amino acid sequence set forth in SEQ ID NO:174, SEQ ID NO:176, SEQ ID NO:178, or SEQ ID NO:180;

[0104] and a plant-derived or synthetic steviol glycoside precursor or a plant-derived or synthetic steviol precursor to a reaction mixture;

[0105] wherein at least one of the polypeptides is a recombinant polypeptide; and

[0106] producing the one or more steviol glycosides and/or glycosylated steviol precursors, or the composition thereof, thereby.

[0107] In one aspect of the method disclosed herein, the reaction mixture comprises:
[0108] (a) glucose, fructose, sucrose, xylose, rhamnose, uridine diphosphate (UDP)-glucose, UDP-rhamnose, UDP-xylose, and/or N-acetyl-glucosamine; and/or
[0109] (b) reaction buffer and/or salts.

[0110] In one aspect of the method disclosed herein, the one or more steviol glycosides and/or glycosylated steviol precursors are, or the composition thereof comprises 13-SMG, 19-SMG, steviol-1,2-bioside, steviol-1,3-bioside, 1,2-stevioside, 1,3-stevioside, rubusoside, RebA, RebB, RebC, RebD, RebE, RebF, RebM, RebQ, RebI, dulcoside A, a mono-glycosylated ent-kaurenoic acid, a di-glycosylated ent-kaurenoic acid, a tri-glycosylated ent-kaurenoic acid, a mono-glycosylated ent-kaurenols, a di-glycosylated ent-kaurenol, a tri-glycosylated ent-kaurenol, a tri-glycosylated steviol glycoside, a tetra-glycosylated steviol glycoside, a penta-glycosylated steviol glycoside, a hexa-glycosylated steviol glycoside, a hepta-glycosylated steviol glycoside, or an isomer thereof.

[0111] In one aspect of the method disclosed herein:
[0112] (a) the di-glycosylated ent-kaurenoic acid comprises KA2.7 of Table 1;
[0113] (b) the tri-glycosylated ent-kaurenoic acid comprises KA3.1 or KA3.2 of Table 1;
[0114] (c) the di-glycosylated ent-kaurenol comprises KL2.8 of Table 1;
[0115] (d) the tri-glycosylated ent-kaurenol comprises KL3.1 or KOL3.2 of Table 1;
[0116] (e) the steviol glycoside comprises 13-SMG, 19-SMG, steviol-1,2-bioside, steviol-1,3-bioside, rubusoside, RebA, RebE, RebD or RebM;
[0117] (f) the tetra-glycosylated steviol comprises Compound 4.26 or Compound 4.33 of Table 1;
[0118] (g) the penta-glycosylated steviol comprises Compound 5.24 or Compound 5.25 of Table 1;
[0119] (h) the hexa-glycosylated steviol comprises Compound 6.1 or Compound 6.23 of Table 1; and/or
[0120] (i) the hepta-glycosylated steviol comprises Compound 7.2 or Compound 7.5 of Table 1.

[0121] The invention also provides a cell culture, comprising the recombinant host cell of disclosed herein, the cell culture further comprising:
[0122] (a) the one or more steviol glycosides and/or glycosylated steviol precursors, or the composition thereof produced by the recombinant host cell,
[0123] (b) glucose, fructose, sucrose, xylose, rhamnose, UDP-glucose, UDP-rhamnose, UDP-xylose, and/or N-acetyl-glucosamine; and
[0124] (c) supplemental nutrients comprising trace metals, vitamins, salts, yeast nitrogen base (YNB), and/or amino acids;

[0125] wherein the one or more steviol glycosides and/or glycosylated steviol precursors, or the composition thereof is present at a concentration of at least 1 mg/liter of the cell culture;

[0126] wherein the cell culture is enriched for the one or more steviol glycosides and/or glycosylated steviol precursors, or the composition thereof relative to a steviol glycoside composition from a Stevia plant and has a reduced level of Stevia plant-derived components relative to a plant-derived Stevia extract.

[0127] The invention also provides a cell lysate from the recombinant host cell disclosed herein grown in the cell culture, comprising:
[0128] (a) the one or more steviol glycosides and/or glycosylated steviol precursors, or the composition thereof produced by the recombinant host cell;
[0129] (b) glucose, fructose, sucrose, xylose, rhamnose, UDP-glucose, UDP-rhamnose, UDP-xylose, and/or N-acetyl-glucosamine; and/or
[0130] (c) supplemental nutrients comprising trace metals, vitamins, salts, yeast nitrogen base, YNB, and/or amino acids;

[0131] wherein the one or more steviol glycosides and/or glycosylated steviol precursors, or the composition thereof produced by the recombinant host cell is present at a concentration of at least 1 mg/liter of the cell culture.

[0132] The invention also provides a reaction mixture, comprising:
[0133] (a) a polypeptide capable of glycosylating steviol or a steviol glycoside at its C-19 carboxyl group having at least 55% sequence identity to the amino acid sequence set forth in SEQ ID NO:4, and further having at least one amino acid substitution corresponding to residues 79, 80, 81, 83, 184, 260, 286, or 377 of SEQ ID NO:4;
[0134] (b) a polypeptide capable of glycosylating steviol or a steviol glycoside at its C-19 carboxyl group, having at least 55% sequence identity to the amino acid sequence set forth in SEQ ID NO:4, and further having at least one amino acid substitution corresponding to residues 68, 69, 70, 71, 72, 73, 74, 75, 76, 77, 78, 79, 80, 81, 82, or 83 of SEQ ID NO:4;
[0135] (c) a bifunctional polypeptide capable of glycosylating steviol or a steviol glycoside at its C-19 carboxyl group and glycosylating steviol or a steviol glycoside at its C-13 hydroxyl group, having at least 50% sequence identity to the amino acid sequence set forth in SEQ ID NO:132, SEQ ID NO:134, SEQ ID NO:136, SEQ ID NO:138, SEQ ID NO:140, or SEQ ID NO:142, SEQ ID NO:144, SEQ ID NO:146, or SEQ ID NO:148; and/or
[0136] (d) a tagged polypeptide capable of glycosylating steviol or a steviol glycoside at its C-19 carboxyl group, having at least 55% sequence identity to the amino acid sequence set forth in SEQ ID NO:174, SEQ ID NO:176, SEQ ID NO:178, or SEQ ID NO:180;
   and further comprising:
[0137] (e) one or more steviol glycosides and/or glycosylated steviol precursors, or a composition thereof;
[0138] (f) glucose, fructose, sucrose, xylose, rhamnose, uridine diphosphate (UDP)-glucose, UDP-rhamnose, UDP-xylose, and/or N-acetyl-glucosamine; and/or
[0139] (g) reaction buffer and/or salts.

[0140] The invention also provides a composition of one or more steviol glycosides and/or glycosylated steviol precursors produced by the recombinant host cell disclosed herein; wherein the one or more steviol glycosides and/or glycosylated steviol precursors produced by the recombinant host cell are present in relative amounts that are different from a steviol glycoside composition from a Stevia plant and have a reduced level of Stevia plant-derived components relative to a plant-derived Stevia extract.

[0141] The invention also provides a composition of one or more steviol glycosides and/or glycosylated steviol precursors produced by the method disclosed herein; wherein the one or more steviol glycosides and/or glycosylated steviol precursors produced by the recombinant host cell are present in relative amounts that are different from a steviol glycoside composition from a Stevia plant and have a reduced level of Stevia plant-derived components relative to a plant-derived Stevia extract.

[0142] The invention also provides a sweetener composition, comprising one or more steviol glycosides and/or glycosylated steviol precursors produced by the recombinant host cell and/or the method disclosed herein.

[0143] The invention also provides a food product, comprising the sweetener composition disclosed herein.

[0144] The invention also provides a beverage or a beverage concentrate, comprising the sweetener composition disclosed herein.

[0145] The invention also provides a nucleic acid molecule encoding a polypeptide or a catalytically active portion thereof capable of glycosylating steviol or a steviol glycoside at its C-19 carboxyl group, wherein the encoded polypeptide or the catalytically active portion thereof comprises a polypeptide having at least 55% sequence identity to the amino acid sequence set forth in SEQ ID NO:4, and further comprises a polypeptide having at least one amino acid substitution corresponding to residues 79, 80, 81, 83, 184, 260, 286, or 377 of SEQ ID NO:4.

[0146] The invention also provides a nucleic acid molecule encoding a polypeptide or a catalytically active portion thereof capable of glycosylating steviol or a steviol glycoside at its C-19 carboxyl group, wherein the encoded polypeptide or the catalytically active portion thereof comprises a polypeptide having at least 55% sequence identity to the amino acid sequence set forth in SEQ ID NO:4, and further comprises a polypeptide having at least one amino acid substitution corresponding to residues 68, 69, 70, 71, 72, 73, 74, 75, 76, 77, 78, 79, 80, 81, 82, or 83 of SEQ ID NO:4.

[0147] In one aspect of the nucleic acid molecule disclosed herein, the encoded polypeptide or the catalytically active portion thereof comprises a M79V, M79E, S80C, A81W, E83K, H184V, H184T N260T, K286C, K286E, K286N, K286T, and/or S377Q amino acid substitution corresponding to SEQ ID NO:4.

[0148] In one aspect of the nucleic acid molecule disclosed herein, the encoded polypeptide or the catalytically active portion thereof comprises:

[0149] (a) a K286C substitution corresponding to SEQ ID NO:4;

[0150] (b) a M79V substitution corresponding to SEQ ID NO:4;

[0151] (c) a S377Q substitution corresponding to SEQ ID NO:4;

[0152] (d) a S800 substitution corresponding to SEQ ID NO:4;

[0153] (e) a N260T and a K286C substitution corresponding to SEQ ID NO:4;

[0154] (f) a H184V substitution corresponding to SEQ ID NO:4;

[0155] (g) a A81W and a E83K substitution corresponding to SEQ ID NO:4

[0156] (h) a A81W substitution corresponding to SEQ ID NO:4;

[0157] (i) a H184T substitution corresponding to SEQ ID NO:4;

[0158] (k) a K286N substitution corresponding to SEQ ID NO:4;

[0159] (l) a M79E substitution corresponding to SEQ ID NO:4; or

[0160] (m) a K286T substitution corresponding to SEQ ID NO:4.

[0161] The invention also provides a nucleic acid molecule encoding a tagged polypeptide or a catalytically active portion thereof capable of glycosylating steviol or a steviol glycoside at its C-19 carboxyl group, wherein the encoded tagged polypeptide or the catalytically active portion thereof comprises a polypeptide having at least 55% sequence identity to the amino acid sequence set forth in SEQ ID NO:174, SEQ ID NO:176, SEQ ID NO:178, or SEQ ID NO:180.

[0162] The invention also provides a nucleic acid molecule encoding a bifunctional polypeptide or a catalytically active portion thereof capable of glycosylating steviol or a steviol glycoside at its C-19 carboxyl group and glycosylating steviol or a steviol glycoside at its C-13 hydroxyl group, wherein the encoded bifunctional polypeptide or the catalytically active portion thereof comprises a polypeptide having at least 50% sequence identity to the amino acid sequence set forth in SEQ ID NO:132, SEQ ID NO:134, SEQ ID NO:136, SEQ ID NO:138, SEQ ID NO:140, or SEQ ID NO:142, SEQ ID NO:144, SEQ ID NO:146, or SEQ ID NO:148.

[0163] In one aspect of the nucleic acid molecule disclosed herein, the nucleic acid is an isolated nucleic acid.

[0164] In one aspect of the nucleic acid molecule disclosed herein, the nucleic acid is cDNA.

[0165] The invention also provides a polypeptide or a catalytically active portion thereof capable of glycosylating steviol or a steviol glycoside at its C-19 carboxyl group, wherein the polypeptide or the catalytically active portion thereof comprises a polypeptide having at least 55% sequence identity to the amino acid sequence set forth in SEQ ID NO:4, and further comprises a polypeptide having at least one amino acid substitution corresponding to residues 79, 80, 81, 83, 184, 260, 286, or 377 of SEQ ID NO:4.

[0166] The invention also provides a polypeptide or a catalytically active portion thereof capable of glycosylating steviol or a steviol glycoside at its C-19 carboxyl group, wherein the polypeptide or the catalytically active portion thereof comprises a polypeptide having at least 55% sequence identity to the amino acid sequence set forth in SEQ ID NO:4, and further comprises a polypeptide having at least one amino acid substitution corresponding to residues 68, 69, 70, 71, 72, 73, 74, 75, 76, 77, 78, 79, 80, 81, 82, or 83 of SEQ ID NO:4.

[0167] In one aspect, the polypeptide or the catalytically active portion thereof disclosed herein comprises a M79V, M79E, S80C, A81W, E83K, H184V, H184T N260T, K286C, K286E, K286N, K286T, and/or S377Q amino acid substitution corresponding to SEQ ID NO:4.

[0168] In one aspect, the polypeptide or the catalytically active portion thereof disclosed herein comprises:

[0169] (a) a K286C substitution corresponding to SEQ ID NO:4;

[0170] (b) a M79V substitution corresponding to SEQ ID NO:4;

[0171] (c) a S377Q substitution corresponding to SEQ ID NO:4;

[0172] (d) a S800 substitution corresponding to SEQ ID NO:4;

[0173] (e) a N260T and a K286C substitution corresponding to SEQ ID NO:4;

[0174] (f) a H184V substitution corresponding to SEQ ID NO:4;

[0175] (g) a A81W and a E83K substitution corresponding to SEQ ID NO:4

[0176] (h) a A81W substitution corresponding to SEQ ID NO:4;

[0177] (i) a H184T substitution corresponding to SEQ ID NO:4;

[0178] (k) a K286N substitution corresponding to SEQ ID NO:4;

[0179] (l) a M79E substitution corresponding to SEQ ID NO:4; or

[0180] (m) a K286T substitution corresponding to SEQ ID NO:4.

[0181] The invention also provides a tagged polypeptide or a catalytically active portion thereof capable of glycosylating steviol or a steviol glycoside at its C-19 carboxyl group, wherein the tagged polypeptide or the catalytically active portion thereof comprises a polypeptide having at least 55% sequence identity to the amino acid sequence set forth in SEQ ID NO:174, SEQ ID NO:176, SEQ ID NO:178, or SEQ ID NO:180.

[0182] The invention also provides a bifunctional polypeptide or a catalytically active portion thereof capable of glycosylating steviol or a steviol glycoside at its C-19 carboxyl group and glycosylating steviol or a steviol glycoside at its C-13 hydroxyl group, wherein the bifunctional polypeptide or the catalytically active portion thereof comprises a polypeptide having at least 50% sequence identity to the amino acid sequence set forth in SEQ ID NO:132, SEQ ID NO:134, SEQ ID NO:136, SEQ ID NO:138, SEQ ID NO:140, or SEQ ID NO:142, SEQ ID NO:144, SEQ ID NO:146, or SEQ ID NO:148.

[0183] In one aspect, the polypeptide or the catalytically active portion thereof disclosed herein is a purified polypeptide or a catalytically active portion thereof.

[0184] These and other features and advantages of the present invention will be more fully understood from the following detailed description taken together with the accompanying claims. It is noted that the scope of the claims is defined by the recitations therein and not by the specific discussion of features and advantages set forth in the present description.

### BRIEF DESCRIPTION OF THE DRAWINGS

[0185] FIG. 1 shows representative primary steviol glycoside glycosylation reactions catalyzed by suitable UGT enzymes and chemical structures for several steviol glycoside compounds.

[0186] FIG. 2 shows the biochemical pathway for the production of steviol, glycosylated ent-kaurenoic acid, and glycosylated ent-kaurenol from prenyl phosphates.

[0187] FIG. 3 shows cultures of a control S. cerevisiae strain, an S. cerevisiae strain expressing UGT74G1 (SEQ ID NO:1, SEQ ID NO:4), an S. cerevisiae strain expressing UGT74G1 Var_7 (SEQ ID NO:129, SEQ ID NO:130), and an S. cerevisiae strain expressing Chim_4 (SEQ ID NO:137, SEQ ID NO:138).

[0188] FIG. 4 shows the structures of steviol+6Glc (isomer 1) and steviol+7Glc (isomer 2).

[0189] FIG. 5 shows the structures of steviol+7Glc (isomer 5) and steviol+4Glc (#26).

[0190] FIG. 6 shows the structures of ent-kaurenoic acid+3Glc (isomer 2), ent-kaurenol+3Glc (isomer 1), and ent-kaurenoic acid+3Glc (isomer 1).

[0191] FIG. 7 shows accumulation of 13-SMG, RebA, RebB, RebD, and RebM by steviol glycoside-producing S. cerevisiae strains expressing tagged UGT74G1 polypeptides (Strain 1). Legend: Ø are control strains (transformed with an empty plasmid) derived from strain control A (engineered to disrupt expression of native UGT74G1 polypeptide). Control B represents a typical steviol glycoside-producing strain and is herein included as reference. Two different integrations sites were used to express the tagged UGT74G1 polypeptides described in Table 15 of Example 7, below: XII-1 (left set of bars) or XII-5 (right set of bars). Each value represents an average of 6 independent clones. See Example 7. For each variant (for each set of bars), the bars correspond to, from left to right, 13-SMG, RebB, RebA, RebD, and RebM accumulation.

[0192] FIG. 8 shows accumulation of glycosylated ent-kaurenoic acid and glycosylated ent-kaurenol by steviol glycoside-producing S. cerevisiae strains expressing tagged UGT74G1 polypeptides (strain 1). See, Example 7. For legend, see description of FIG. 7. For each variant (for each set of bars), the bars correspond to, from left to right, ent-kaurenoic acid+2Glc (#7), ent-kaurenoic acid+3Glc (isomer 1), ent-kaurenoic acid+3Glc (isomer 2), ent-kaurenol+2Glc (#8), and ent-kaurenol+3Glc (isomers 1 and 2) accumulation.

[0193] FIG. 9 shows total steviol glycoside accumulation by steviol glycoside-producing S. cerevisiae strains expressing tagged UGT74G1 polypeptides (Strain1). See Example 7. Each tagged UGT74G1 polypeptide was expressed from 2 different intregration sites (XII-1 (left bar) or XII-5 (right bar)). Each bar represents an average of 6 independent clones. For legend, see description of FIG. 7.

[0194] FIG. 10 shows accumulation of 13-SMG, RebA, RebB, RebD, and RebM by steviol glycoside-producing S. cerevisiae strains expressing tagged UGT74G1 polypeptides (Strain 2). See Example 8. Legend: Ø are control strains (control A, see the description of FIG. 7, above) transformed with an empty plasmid. Control B represents a typical steviol glycoside-producing strain and is herein included as reference. Each bar represents an average of 6 independent clones. For each variant (for each bar) of the top graph, the portions of the bar correspond to, from top to bottom, RebM, RebD, RebA, and RebB accumulation.

[0195] FIG. 11 shows accumulation of RebE, 1,3-stevioside, rubusoside, 1,2-bioside, and 19-SMG by steviol glycoside-producing S. cerevisiae strains expressing tagged UGT74G1 polypeptides (Strain 2). See Example 8. For legend, see description of FIG. 10. For each variant (for each bar), the portions of the bar correspond to, from top to bottom, RebE, 1,3-stevioside, rubusoside, 1,2-bioside, and 19-SMG accumulation.

[0196] FIG. 12 shows accumulation of glycosylated ent-kaurenoic acid and glycosylated ent-kaurenol by steviol glycoside-producing S. cerevisiae strains expressing tagged UGT74G1 polypeptides (Strain 2). See Example 8. For legend, see description of FIG. 10. For each variant (for each set of bars), the bars correspond to, from left to right, ent-kaurenoic acid+2Glc (#7), ent-kaurenoic acid+3Glc (isomer 1), ent-kaurenoic acid+3Glc (isomer 2), ent-kaurenol+2Glc (#8), and ent-kaurenol+3Glc (isomers 1 and 2) accumulation.

[0197] FIG. 13 shows accumulation of 13-SMG (bottom), and RebA, RebB, RebD, and RebM (top) by steviol glycoside-producing S. cerevisiae strains expressing tagged UGT74G1 polypeptides (Strains 3 and 4). See Example 9. Legend: Control A (see the description of FIG. 7, above) was transformed with an empty plasmid. Control B represents a typical steviol glycoside-producing strain and is herein included as reference. For each variant (for each bar) of the top graph, the portions of the bar correspond to, from top to bottom, RebM, RebD, RebA, and RebB accumulation.

[0198] FIG. 14 (top graph) shows accumulation of 19-SMG, 1,2-bioside, Rubusoside and Reb E by steviol glycoside-producing S. cerevisiae strains expressing tagged UGT74G1 polypeptides (Strain 3 and 4). For each variant (for each bar) of the top graph, the portions of the bar correspond to, from bottom to top, 19-SMG, steviol-1,2-bioside, rubusoside, and RebE accumulation. FIG. 14 (bottom graph) shows accumulation of glycosylated ent-kaurenoic acid and glycosylated ent-kaurenol by steviol glycoside-producing S. cerevisiae strains expressing tagged UGT74G1 polypeptides (Strains 3 and 4). See Example 9. For legend, see description of FIG. 13. For each variant (for each bar) of the bottom graph, the portions of the bar correspond to, from bottom to top, ent-kaurenoic acid+2Glc (#7), ent-kaurenoic acid+3Glc (isomer 1), ent-kaurenoic acid+3Glc (isomer 2), ent-kaurenol+2Glc (#8), and ent-kaurenol+3Glc (isomers 1 and 2) accumulation.

[0199] FIGS. 15A, 15B, and 15C show a ¹H NMR spectrum and ¹H and ¹³C NMR chemical shifts (in ppm) for ent-kaurenoic acid+3Glc (isomer 1). FIGS. 15D, 15E, and 15F show a ¹H NMR spectrum and ¹H and ¹³C NMR chemical shifts (in ppm) for ent-kaurenoic acid+3Glc (isomer 2). FIGS. 15G, 15H, and 15I show a ¹H NMR spectrum and ¹H and ¹³C NMR chemical shifts (in ppm) for ent-kaurenol+3Glc (isomer 1). FIGS. 15J, 15K, 15L, and 15M show a ¹H NMR spectrum and ¹H and ¹³C NMR chemical shifts (in ppm) for steviol+6Glc (isomer 1). FIGS. 15N, 15O, 15P, and 15Q show a ¹H NMR spectrum and ¹H and ¹³C NMR chemical shifts (in ppm) for steviol+7Glc (isomer 2). FIGS. 15R, 15S, 15T, and 15U show a ¹H NMR spectrum and ¹H and ¹³C NMR chemical shifts (in ppm) for steviol+7Glc (isomer 5). FIGS. 15V, 15W, 15X, and 15Y show a ¹H NMR spectrum and ¹H and ¹³C NMR chemical shifts (in ppm) for steviol+4Glc (#26).

[0200] Skilled artisans will appreciate that elements in the Figures are illustrated for simplicity and clarity and have not necessarily been drawn to scale. For example, the dimensions of some of the elements in the Figures can be exaggerated relative to other elements to help improve understanding of the embodiment(s) of the present invention.

### DETAILED DESCRIPTION OF THE INVENTION

[0201] All publications, patents and patent applications cited herein are hereby expressly incorporated by reference for all purposes.

[0202] Before describing the present invention in detail, a number of terms will be defined. As used herein, the singular forms “a,” “an,” and “the” include plural referents unless the context clearly dictates otherwise. For example, reference to a “nucleic acid” means one or more nucleic acids.

[0203] It is noted that terms like “preferably,” “commonly,” and “typically” are not utilized herein to limit the scope of the claimed invention or to imply that certain features are critical, essential, or even important to the structure or function of the claimed invention. Rather, these terms are merely intended to highlight alternative or additional features that can or cannot be utilized in a particular embodiment of the present invention.

[0204] For the purposes of describing and defining the present invention it is noted that the term “substantially” is utilized herein to represent the inherent degree of uncertainty that can be attributed to any quantitative comparison, value, measurement, or other representation. The term “substantially” is also utilized herein to represent the degree by which a quantitative representation can vary from a stated reference without resulting in a change in the basic function of the subject matter at issue.

[0205] Methods well known to those skilled in the art can be used to construct genetic expression constructs and recombinant cells according to this invention. These methods include in vitro recombinant DNA techniques, synthetic techniques, in vivo recombination techniques, and polymerase chain reaction (PCR) techniques. See, for example, techniques as described in Green & Sambrook, 2012, MOLECULAR CLONING: A LABORATORY MANUAL, Fourth Edition, Cold Spring Harbor Laboratory, New York; Ausubel et al., 1989, CURRENT PROTOCOLS IN MOLECULAR BIOLOGY, Greene Publishing Associates and Wiley Interscience, New York, and PCR Protocols: A Guide to Methods and Applications (Innis et al., 1990, Academic Press, San Diego, Calif.).

[0206] As used herein, the terms “polynucleotide,” “nucleotide,” “oligonucleotide,” and “nucleic acid” can be used interchangeably to refer to nucleic acid comprising DNA, RNA, derivatives thereof, or combinations thereof, in either single-stranded or double-stranded embodiments depending on context as understood by the skilled worker.

[0207] As used herein, the terms “microorganism,” “microorganism host,” and “microorganism host cell” can be used interchangeably. As used herein, the terms “recombinant host” and “recombinant host cell” can be used interchangeably. The person of ordinary skill in the art will appreciate that the terms “microorganism,” microorganism host,” and “microorganism host cell,” when used to describe a cell comprising a recombinant gene, may be taken to mean “recombinant host” or “recombinant host cell.” As used herein, the term “recombinant host” is intended to refer to a host, the genome of which has been augmented by at least one DNA sequence. Such DNA sequences include but are not limited to genes that are not naturally present, DNA sequences that are not normally transcribed into RNA or translated into a protein (“expressed”), and other genes or DNA sequences which one desires to introduce into a host. It will be appreciated that typically the genome of a recombinant host described herein is augmented through stable introduction of one or more recombinant genes. Generally, introduced DNA is not originally resident in the host that is the recipient of the DNA, but it is within the scope of this disclosure to isolate a DNA segment from a given host, and to subsequently introduce one or more additional copies of that DNA into the same host, e.g., to enhance production of the product of a gene or alter the expression pattern of a gene. In some instances, the introduced DNA will modify or even replace an endogenous gene or DNA sequence by, e.g., homologous recombination or site-directed mutagenesis. Suitable recombinant hosts include microorganisms.

[0208] As used herein, the term “recombinant gene” refers to a gene or DNA sequence that is introduced into a recipient host, regardless of whether the same or a similar gene or DNA sequence may already be present in such a host. “Introduced,” or “augmented” in this context, is known in the art to mean introduced or augmented by the hand of man. Thus, a recombinant gene can be a DNA sequence from another species or can be a DNA sequence that originated from or is present in the same species but has been incorporated into a host by recombinant methods to form a recombinant host. It will be appreciated that a recombinant gene that is introduced into a host can be identical to a DNA sequence that is normally present in the host being transformed, and is introduced to provide one or more additional copies of the DNA to thereby permit overexpression or modified expression of the gene product of that DNA. In some aspects, said recombinant genes are encoded by cDNA. In other embodiments, recombinant genes are synthetic and/or codon-optimized for expression in S. cerevisiae.

[0209] As used herein, the term “engineered biosynthetic pathway” refers to a biosynthetic pathway that occurs in a recombinant host, as described herein. In some aspects, one or more steps of the biosynthetic pathway do not naturally occur in an unmodified host. In some embodiments, a heterologous version of a gene is introduced into a host that comprises an endogenous version of the gene.

[0210] As used herein, the term “endogenous” gene refers to a gene that originates from and is produced or synthesized within a particular organism, tissue, or cell. In some embodiments, the endogenous gene is a yeast gene. In some embodiments, the gene is endogenous to S. cerevisiae, including, but not limited to S. cerevisiae strain S288C. In some embodiments, an endogenous yeast gene is overexpressed. As used herein, the term “overexpress” is used to refer to the expression of a gene in an organism at levels higher than the level of gene expression in a wild type organism. See, e.g., Prelich, 2012, Genetics 190:841-54. In some embodiments, an endogenous yeast gene, for example ADH, is deleted. See, e.g., Giaever & Nislow, 2014, Genetics 197(2):451-65. As used herein, the terms “deletion,” “deleted,” “knockout,” and “knocked out” can be used interchangabley to refer to an endogenous gene that has been manipulated to no longer be expressed in an organism, including, but not limited to, S. cerevisiae.

[0211] As used herein, the terms “heterologous sequence” and “heterologous coding sequence” are used to describe a sequence derived from a species other than the recombinant host. In some embodiments, the recombinant host is an S. cerevisiae cell, and a heterologous sequence is derived from an organism other than S. cerevisiae. A heterologous coding sequence, for example, can be from a prokaryotic microorganism, a eukaryotic microorganism, a plant, an animal, an insect, or a fungus different than the recombinant host expressing the heterologous sequence. In some embodiments, a coding sequence is a sequence that is native to the host.

[0212] A “selectable marker” can be one of any number of genes that complement host cell auxotrophy, provide antibiotic resistance, or result in a color change. Linearized DNA fragments of the gene replacement vector then are introduced into the cells using methods well known in the art (see below). Integration of the linear fragments into the genome and the disruption of the gene can be determined based on the selection marker and can be verified by, for example, PCR or Southern blot analysis. Subsequent to its use in selection, a selectable marker can be removed from the genome of the host cell by, e.g., Cre-LoxP systems (see, e.g., Gossen et al., 2002, Ann. Rev. Genetics 36:153-173 and U.S. 2006/0014264). Alternatively, a gene replacement vector can be constructed in such a way as to include a portion of the gene to be disrupted, where the portion is devoid of any endogenous gene promoter sequence and encodes none, or an inactive fragment of, the coding sequence of the gene.

[0213] As used herein, the terms “variant” and “mutant” are used to describe a protein sequence that has been modified at one or more amino acids, compared to the wild-type sequence of a particular protein.

[0214] As used herein, the term “inactive fragment” is a fragment of the gene that encodes a protein having, e.g., less than about 10% (e.g., less than about 9%, less than about 8%, less than about 7%, less than about 6%, less than about 5%, less than about 4%, less than about 3%, less than about 2%, less than about 1%, or 0%) of the activity of the protein produced from the full-length coding sequence of the gene. Such a portion of a gene is inserted in a vector in such a way that no known promoter sequence is operably linked to the gene sequence, but that a stop codon and a transcription termination sequence are operably linked to the portion of the gene sequence. This vector can be subsequently linearized in the portion of the gene sequence and transformed into a cell. By way of single homologous recombination, this linearized vector is then integrated in the endogenous counterpart of the gene with inactivation thereof.

[0215] As used herein, the term “steviol glycoside” refers to Rebaudioside A (RebA) (CAS #58543-16-1), Rebaudioside B (RebB) (CAS #58543-17-2), Rebaudioside C (RebC) (CAS #63550-99-2), Rebaudioside D (RebD) (CAS #63279-13-0), Rebaudioside E (RebE) (CAS #63279-14-1), Rebaudioside F (RebF) (CAS #438045-89-7), Rebaudioside M (RebM) (CAS #1220616-44-3), rubusoside (CAS #63849-39-4), Dulcoside A (CAS #64432-06-0), Rebaudioside I (RebI) (MassBank Record: FU000332), Rebaudioside Q (RebQ), 1,2-stevioside (CAS #57817-89-7), 1,3-stevioside (RebG), steviol-1,2-bioside (MassBank Record: FU000299), steviol-1,3-bioside, steviol-13-O-glucoside (13-SMG), steviol-19-O-glucoside (19-SMG), a tri-glycosylated steviol glycoside, a tetra-glycosylated steviol glycoside, a penta-glycosylated steviol glycoside, a hexa-glycosylated steviol glycoside, a hepta-glycosylated steviol glycoside, and isomers thereof. See FIG. 1; see also, Steviol Glycosides Chemical and Technical Assessment 69th JECFA, 2007, prepared by Harriet Wallin, Food Agric. Org. Nuclear magnetic resonance (NMR) spectra for steviol glycoside isomers disclosed herein can be found in FIG. 15.

[0216] As used herein, the terms “steviol glycoside precursor” and “steviol glycoside precursor compound” are used to refer to intermediate compounds in the steviol glycoside biosynthetic pathway. Steviol glycoside precursors include, but are not limited to, geranylgeranyl diphosphate (GGPP), ent-copalyl-diphosphate, ent-kaurene, ent-kaurenol, ent-kaurenal, ent-kaurenoic acid, and steviol. See FIG. 2. Also as used herein, the terms “steviol precursor” and “steviol precursor compound” are used to refer to intermediate compounds in the steviol biosynthetic pathway. Steviol precursors may also be steviol glycoside precursors, and include, but are not limited to, geranylgeranyl diphosphate (GGPP), ent-copalyl-diphosphate, ent-kaurene, ent-kaurenol, ent-kaurenal, and ent-kaurenoic acid. In some embodiments, steviol precurors can be glycosylated, e.g., tri-glycosylated ent-kaurenoic acid (ent-kaurenoic acid+3Glc), di-glycosylated ent-kaurenoic acid, mono-glycosylated ent-kaurenoic acid, tri-glycosylated ent-kaurenol, di-glycosylated ent-kaurenol (ent-kaurenol+2Glc), or mono-glycosylated ent-kaurenol (ent-kaurenol+1Glc). In some embodiments, steviol glycoside precursors are themselves steviol glycoside compounds. For example, 19-SMG, rubusoside, stevioside, and RebE are steviol glycoside precursors of RebM. See FIG. 1.

[0217] As used herein, the term “contact” is used to refer to any physical interaction between two objects. For example, the term “contact” may refer to the interaction between an an enzyme and a substrate. In another example, the term “contact” may refer to the interaction between a liquid (e.g., a supernatant) and an adsorbent resin.

[0218] Steviol glycosides, steviol glycoside precursors, and/or glycosides of steviol precursors can be produced in vivo (i.e., in a recombinant host), in vitro (i.e., enzymatically), or by whole cell bioconversion. As used herein, the terms “produce” and “accumulate” can be used interchangeably to describe synthesis of steviol glycosides, glycosides of steviol precursors, and steviol glycoside precursors in vivo, in vitro, or by whole cell bioconversion.

[0219] Recombinant steviol glycoside-producing Saccharomyces cerevisiae (S. cerevisiae) strains are described in WO 2011/153378, WO 2013/022989, WO 2014/122227, and WO 2014/122328. Methods of producing steviol glycosides in recombinant hosts, by whole cell bio-conversion, and in vitro are also described in WO 2011/153378, WO 2013/022989, WO 2014/122227, and WO 2014/122328.

[0220] As used herein, the terms “culture broth,” “culture medium,” and “growth medium” can be used interchangeably to refer to a liquid or solid that supports growth of a cell. A culture broth can comprise glucose, fructose, sucrose, trace metals, vitamins, salts, yeast nitrogen base (YNB), and/or amino acids. The trace metals can be divalent cations, including, but not limited to, Mn²⁺ and/or Mg²⁺. In some embodiments, Mn²⁺ can be in the form of MnCl₂ dihydrate and range from approximately 0.01 g/L to 100 g/L. In some embodiments, Mg²⁺ can be in the form of MgSO₄ heptahydrate and range from approximately 0.01 g/L to 100 g/L. For example, a culture broth can comprise i) approximately 0.02-0.03 g/L MnCl₂ dihydrate and approximately 0.5-3.8 g/L MgSO₄ heptahydrate, ii) approximately 0.03-0.06 g/L MnCl₂ dihydrate and approximately 0.5-3.8 g/L MgSO₄ heptahydrate, and/or iii) approximately 0.03-0.17 g/L MnCl₂ dihydrate and approximately 0.5-7.3 g/L MgSO₄ heptahydrate. Additionally, a culture broth can comprise one or more steviol glycosides produced by a recombinant host, as described herein.

[0221] In some embodiments, a recombinant host comprising a gene encoding a polypeptide capable of synthesizing geranylgeranyl pyrophosphate (GGPP) from farnesyl diphosphate (FPP) and isopentenyl diphosphate (IPP) (e.g., geranylgeranyl diphosphate synthase (GGPPS)); a gene encoding a polypeptide capable of synthesizing ent-copalyl diphosphate from GGPP (e.g., ent-copalyl diphosphate synthase (CDPS)); a gene encoding a polypeptide capable of synthesizing ent-kaurene from ent-copalyl diphosphate (e.g., kaurene synthase (KS)); a gene encoding a polypeptide capable of synthesizing ent-kaurenoic acid, ent-kaurenol, and/or ent-kaurenol from ent-kaurene (e.g., kaurene oxidase (KO)); a gene encoding a polypeptide capable of reducing cytochrome P450 complex (e.g., cytochrome P450 reductase (CPR) or P450 oxidoreductase (POR); for example, but not limited to a polypeptide capable of electron transfer from NADPH to cytochrome P450 complex during conversion of NADPH to NADP⁺, which is utilized as a cofactor for terpenoid biosynthesis); a gene encoding a polypeptide capable of synthesizing steviol from ent-kaurenoic acid (e.g., steviol synthase (KAH)); and/or a gene encoding a bifunctional polypeptide capable of synthesizing ent-copalyl diphosphate from GGPP and synthesizing ent-kaurene from ent-copalyl diphosphate (e.g., an ent-copalyl diphosphate synthase (CDPS)—ent-kaurene synthase (KS) polypeptide) can produce steviol in vivo. See, e.g., FIG. 1. The skilled worker will appreciate that one or more of these genes can be endogenous to the host provided that at least one (and in some embodiments, all) of these genes is a recombinant gene introduced into the recombinant host.

[0222] In some embodiments, a recombinant host comprising a gene encoding a polypeptide capable of glycosylating steviol or a steviol glycoside at its C-13 hydroxyl group (e.g., a UGT85C2 polypeptide); a gene encoding a polypeptide capable of beta 1,3 glycosylation of the C3′ of the 13-O-glucose, 19-O-glucose, or both 13-O-glucose and 19-O-glucose of a steviol glycoside (e.g., a UGT76G1 polypeptide); a gene encoding a polypeptide capable of glycosylating steviol or a steviol glycoside at its C-19 carboxyl group (e.g., a UGT74G1 polypeptide); and/or a gene encoding a polypeptide capable of beta 1,2 glycosylation of the C2′ of the 13-O-glucose, 19-O-glucose, or both 13-O-glucose and 19-O-glucose of a steviol glycoside (e.g., a UGT91D2 or EUGT11 polypeptide) can produce a steviol glycoside in vivo. The skilled worker will appreciate that one or more of these genes can be endogenous to the host provided that at least one (and in some embodiments, all) of these genes is a recombinant gene introduced into the recombinant host.

[0223] In some embodiments, steviol glycosides, glycosides of steviol precursors, and/or steviol glycoside precursors are produced in vivo through expression of one or more enzymes involved in the steviol glycoside biosynthetic pathway in a recombinant host. For example, a recombinant host comprising a gene encoding a polypeptide capable of synthesizing GGPP from FPP and IPP; a gene encoding a polypeptide capable of synthesizing ent-copalyl diphosphate from GGPP; a gene encoding a polypeptide capable of synthesizing ent-kaurene from ent-copalyl diphosphate; a gene encoding a polypeptide capable of synthesizing ent-kaurenoic acid, ent-kaurenol, and/or ent-kaurenal from ent-kaurene; a gene encoding a polypeptide capable of reducing cytochrome P450 complex; a gene encoding a bifunctional polypeptide capable of synthesizing ent-copalyl diphosphate from GGPP and synthesizing ent-kaurene from ent-copalyl diphosphate; a gene encoding a polypeptide capable of glycosylating steviol or a steviol glycoside at its C-13 hydroxyl group; a gene encoding a polypeptide capable of beta 1,3 glycosylation of the C3′ of the 13-O-glucose, 19-O-glucose, or both 13-O-glucose and 19-O-glucose of a steviol glycoside; a gene encoding a polypeptide capable of glycosylating steviol or a steviol glycoside at its C-19 carboxyl group; and/or a gene encoding a polypeptide capable of beta 1,2 glycosylation of the C2′ of the 13-O-glucose, 19-O-glucose, or both 13-O-glucose and 19-O-glucose of a steviol glycoside can produce a steviol glycoside and/or steviol glycoside precursors in vivo. See, e.g., FIGS. 1 and 2. The skilled worker will appreciate that one or more of these genes can be endogenous to the host provided that at least one (and in some embodiments, all) of these genes is a recombinant gene introduced into the recombinant host.

[0224] In some aspects, the polypeptide capable of synthesizing GGPP from FPP and IPP comprises a polypeptide having an amino acid sequence set forth in SEQ ID NO:20 (which can be encoded by the nucleotide sequence set forth in SEQ ID NO:19), SEQ ID NO:22 (encoded by the nucleotide sequence set forth in SEQ ID NO:21), SEQ ID NO:24 (encoded by the nucleotide sequence set forth in SEQ ID NO:23), SEQ ID NO:26 (encoded by the nucleotide sequence set forth in SEQ ID NO:25), SEQ ID NO:28 (encoded by the nucleotide sequence set forth in SEQ ID NO:27), SEQ ID NO:30 (encoded by the nucleotide sequence set forth in SEQ ID NO:29), SEQ ID NO:32 (encoded by the nucleotide sequence set forth in SEQ ID NO:31), or SEQ ID NO:116 (encoded by the nucleotide sequence set forth in SEQ ID NO:115).

[0225] In some aspects, the polypeptide capable of synthesizing ent-copalyl diphosphate from GGPP comprises a polypeptide having an amino acid sequence set forth in SEQ ID NO:34 (which can be encoded by the nucleotide sequence set forth in SEQ ID NO:33), SEQ ID NO:36 (encoded by the nucleotide sequence set forth in SEQ ID NO:35), SEQ ID NO:38 (encoded by the nucleotide sequence set forth in SEQ ID NO:37), SEQ ID NO:40 (encoded by the nucleotide sequence set forth in SEQ ID NO:39), or SEQ ID NO:42 (encoded by the nucleotide sequence set forth in SEQ ID NO:41). In some embodiments, the polypeptide capable of synthesizing ent-copalyldiphosphate from GGPP lacks a chloroplast transit peptide.

[0226] In some aspects, the polypeptide capable of synthesizing ent-kaurene from ent-copalyl pyrophosphate comprises a polypeptide having an amino acid sequence set forth in SEQ ID NO:44 (which can be encoded by the nucleotide sequence set forth in SEQ ID NO:43), SEQ ID NO:46 (encoded by the nucleotide sequence set forth in SEQ ID NO:45), SEQ ID NO:48 (encoded by the nucleotide sequence set forth in SEQ ID NO:47), SEQ ID NO:50 (encoded by the nucleotide sequence set forth in SEQ ID NO:49), or SEQ ID NO:52 (encoded by the nucleotide sequence set forth in SEQ ID NO:51).

[0227] In some embodiments, a recombinant host comprises a gene encoding a bifunctional polypeptide capable of synthesizing ent-copalyl diphosphate from GGPP and synthesizing ent-kaurene from ent-copalyl pyrophosphate. In some aspects, the bifunctional polypeptide comprises a polypeptide having an amino acid sequence set forth in SEQ ID NO:54 (which can be encoded by the nucleotide sequence set forth in SEQ ID NO:53), SEQ ID NO:56 (encoded by the nucleotide sequence set forth in SEQ ID NO:55), or SEQ ID NO:58 (encoded by the nucleotide sequence set forth in SEQ ID NO:57).

[0228] In some aspects, the polypeptide capable of synthesizing ent-kaurenoic acid, ent-kaurenol, and/or ent-kaurenol from ent-kaurene comprises a polypeptide having an amino acid sequence set forth in SEQ ID NO:60 (which can be encoded by the nucleotide sequence set forth in SEQ ID NO:59), SEQ ID NO:62 (encoded by the nucleotide sequence set forth in SEQ ID NO:61), SEQ ID NO:117 (encoded by the nucleotide sequence set forth in SEQ ID NO:63 or SEQ ID NO:64), SEQ ID NO:66 (encoded by the nucleotide sequence set forth in SEQ ID NO:65), SEQ ID NO:68 (encoded by the nucleotide sequence set forth in SEQ ID NO:67), SEQ ID NO:70 (encoded by the nucleotide sequence set forth in SEQ ID NO:69), SEQ ID NO:72 (encoded by the nucleotide sequence set forth in SEQ ID NO:71), SEQ ID NO:74 (encoded by the nucleotide sequence set forth in SEQ ID NO:73), or SEQ ID NO:76 (encoded by the nucleotide sequence set forth in SEQ ID NO:75).

[0229] In some aspects, the polypeptide capable of reducing cytochrome P450 complex comprises a polypeptide having an amino acid sequence set forth in SEQ ID NO:78 (which can be encoded by the nucleotide sequence set forth in SEQ ID NO:77), SEQ ID NO:80 (encoded by the nucleotide sequence set forth in SEQ ID NO:79), SEQ ID NO:82 (encoded by the nucleotide sequence set forth in SEQ ID NO:81), SEQ ID NO:84 (encoded by the nucleotide sequence set forth in SEQ ID NO:83), SEQ ID NO:86 (encoded by the nucleotide sequence set forth in SEQ ID NO:85), SEQ ID NO:88 (encoded by the nucleotide sequence set forth in SEQ ID NO:87), SEQ ID NO:90 (encoded by the nucleotide sequence set forth in SEQ ID NO:89), or SEQ ID NO:92 (encoded by the nucleotide sequence set forth in SEQ ID NO:91).

[0230] In some aspects, the polypeptide capable of synthesizing steviol from ent-kaurenoic acid comprises a polypeptide having an amino acid sequence set forth in SEQ ID NO:94 (which can be encoded by the nucleotide sequence set forth in SEQ ID NO:93), SEQ ID NO:97 (encoded by the nucleotide sequence set forth in SEQ ID NO:95 or SEQ ID NO:96), SEQ ID NO:100 (encoded by the nucleotide sequence set forth in SEQ ID NO:98 or SEQ ID NO:99), SEQ ID NO:101, SEQ ID NO:102, SEQ ID NO:103, SEQ ID NO:104, SEQ ID NO:106 (encoded by the nucleotide sequence set forth in SEQ ID NO:105), SEQ ID NO:108 (encoded by the nucleotide sequence set forth in SEQ ID NO:107), SEQ ID NO:110 (encoded by the nucleotide sequence set forth in SEQ ID NO:109), SEQ ID NO:112 (encoded by the nucleotide sequence set forth in SEQ ID NO:111), or SEQ ID NO:114 (encoded by the nucleotide sequence set forth in SEQ ID NO:113).

[0231] In some embodiments, a recombinant host comprises a nucleic acid encoding a polypeptide capable of glycosylating steviol or a steviol glycoside at its C-13 hydroxyl group (e.g., UGT85C2 polypeptide; SEQ ID NO:7), a nucleic acid encoding a polypeptide capable of beta 1,3 glycosylation of the C3′ of the 13-O-glucose, 19-O-glucose, or both 13-O-glucose and 19-O-glucose of a steviol glycoside (e.g., UGT76G1 polypeptide; SEQ ID NO:9), a nucleic acid encoding a polypeptide capable of glycosylating steviol or a steviol glycoside at its C-19 carboxyl group (e.g., UGT74G1 polypeptide; SEQ ID NO:4), a nucleic acid encoding a polypeptide capable of beta 1,2 glycosylation of the C2′ of the 13-O-glucose, 19-O-glucose, or both 13-O-glucose and 19-O-glucose of a steviol glycoside (e.g., EUGT11 polypeptide; SEQ ID NO:16). In some aspects, the polypeptide capable of beta 1,2 glycosylation of the C2′ of the 13-O-glucose, 19-O-glucose, or both 13-O-glucose and 19-O-glucose of a steviol glycoside (e.g., UGT91D2 polypeptide) can be a UGT91D2e polypeptide (SEQ ID NO:11) or a UGT91D2e-b polypeptide (SEQ ID NO:13).

[0232] In some aspects, the polypeptide capable of glycosylating steviol or a steviol glycoside at its C-13 hydroxyl group is encoded by the nucleotide sequence set forth in SEQ ID NO:5 or SEQ ID NO:6, the polypeptide capable of beta 1,3 glycosylation of the C3′ of the 13-O-glucose, 19-O-glucose, or both 13-O-glucose and 19-O-glucose of a steviol glycoside is encoded by the nucleotide sequence set forth in SEQ ID NO:8, the polypeptide capable of glycosylating steviol or a steviol glycoside at its C-19 carboxyl group is encoded by the nucleotide sequence set forth in SEQ ID NO:3, the polypeptide capable of beta 1,2 glycosylation of the C2′ of the 13-O-glucose, 19-O-glucose, or both 13-O-glucose and 19-O-glucose of a steviol glycoside is encoded by the nucleotide sequence set forth in SEQ ID NO:10, 12, 14, or 15. The skilled worker will appreciate that expression of these genes may be necessary to produce a particular steviol glycoside, but that one or more of these genes can be endogenous to the host provided that at least one (and in some embodiments, all) of these genes is a recombinant gene introduced into the recombinant host.

[0233] In a particular embodiment, a steviol-producing recombinant microorganism comprises exogenous nucleic acids encoding a polypeptide capable of glycosylating steviol or a steviol glycoside at its C-13 hydroxyl group, a polypeptide capable of beta 1,3 glycosylation of the C3′ of the 13-O-glucose, 19-O-glucose, or both 13-O-glucose and 19-O-glucose of a steviol glycoside, and a polypeptide capable of beta 1,2 glycosylation of the C2′ of the 13-O-glucose, 19-O-glucose, or both 13-O-glucose and 19-O-glucose of a steviol glycoside polypeptides.

[0234] In another particular embodiment, a steviol-producing recombinant microorganism comprises exogenous nucleic acids encoding a polypeptide capable of glycosylating steviol or a steviol glycoside at its C-13 hydroxyl group; a polypeptide capable of beta 1,3 glycosylation of the C3′ of the 13-O-glucose, 19-O-glucose, or both 13-O-glucose and 19-O-glucose of a steviol glycoside; a polypeptide capable of glycosylating steviol or a steviol glycoside at its C-19 carboxyl group; and a polypeptide capable of beta 1,2 glycosylation of the C2′ of the 13-O-glucose, 19-O-glucose, or both 13-O-glucose and 19-O-glucose of a steviol glycoside.

[0235] In some embodiments, steviol glycosides, glycosides of steviol precursors, and/or steviol glycoside precursors are produced through contact of a steviol glycoside precursor with one or more enzymes involved in the steviol glycoside pathway in vitro. For example, contacting steviol with one or more of a gene encoding a polypeptide capable of beta 1,3 glycosylation of the C3′ of the 13-O-glucose, 19-O-glucose, or both 13-O-glucose and 19-O-glucose of a steviol glycoside, a polypeptide capable of beta 1,2 glycosylation of the C2′ of the 13-O-glucose, 19-O-glucose, or both 13-O-glucose and 19-O-glucose of a steviol glycoside, and a polypeptide capable of glycosylating steviol or a steviol glycoside at its C-13 hydroxyl group or a polypeptide capable of glycosylating steviol or a steviol glycoside at its C-19 carboxyl group can result in production of a steviol glycoside in vitro. In some embodiments, a steviol glycoside precursor is produced through contact of an upstream steviol glycoside precursor with one or more enzymes involved in the steviol glycoside pathway in vitro. For example, contacting ent-kaurenoic acid with a polypeptide capable of synthesizing steviol from ent-kaurenoic acid can result in production of steviol in vitro.

[0236] In some embodiments, a steviol glycoside or steviol glycoside precursor is produced by whole cell bioconversion. For whole cell bioconversion to occur, a host cell expressing one or more enzymes involved in the steviol glycoside pathway takes up and modifies the steviol glycoside or steviol glycoside precursor in the cell; following modification in vivo, the steviol glycoside or steviol glycoside precursor remains in the cell and/or is excreted into the cell culture medium. For example, a host cell expressing a gene encoding a polypeptide capable of glycosylating steviol or a steviol glycoside at its C-13 hydroxyl group; a gene encoding a polypeptide capable of beta 1,3 glycosylation of the C3′ of the 13-O-glucose, 19-O-glucose, or both 13-O-glucose and 19-O-glucose of a steviol glycoside; a gene encoding a polypeptide capable of glycosylating steviol or a steviol glycoside at its C-19 carboxyl group; and/or a gene encoding a polypeptide capable of beta 1,2 glycosylation of the C2′ of the 13-O-glucose, 19-O-glucose, or both 13-O-glucose and 19-O-glucose of a steviol glycoside can take up steviol and glycosylate steviol in the cell; following glycosylation in vivo, a steviol glycoside can be excreted into the culture medium. In certain such embodiments, the host cell may further express a gene encoding a polypeptide capable of synthesizing GGPP from FPP and IPP; a gene encoding a polypeptide capable of synthesizing ent-copalyl diphosphate from GGPP; a gene encoding a polypeptide capable of synthesizing ent-kaurene from ent-copalyl diphosphate; a gene encoding a polypeptide capable of synthesizing ent-kaurenoic acid, ent-kaurenol, and/or ent-kaurenal from ent-kaurene; a gene encoding a polypeptide capable of reducing cytochrome P450 complex; a gene encoding a polypeptide capable of synthesizing steviol from ent-kaurenoic acid; and/or a gene encoding a bifunctional polypeptide capable of synthesizing ent-copalyl diphosphate from GGPP and synthesizing ent-kaurene from ent-copalyl diphosphate.

[0237] In some embodiments, a polypeptide capable of glycosylating steviol or a steviol glycoside at its C-19 carboxyl group can be displayed on the surface of the recombinant host cells disclosed herein by fusing it with anchoring motifs.

[0238] In some embodiments, the cell is permeabilized to take up a substrate to be modified or to excrete a modified product. In some embodiments, a permeabilizing agent can be added to aid the feedstock entering into the host and product getting out. In some embodiments, the cells are permeabilized with a solvent such as toluene, or with a detergent such as Triton-X or Tween. In some embodiments, the cells are permeabilized with a surfactant, for example a cationic surfactant such as cetyltrimethylammonium bromide (CTAB). In some embodiments, the cells are permeabilized with periodic mechanical shock such as electroporation or a slight osmotic shock. For example, a crude lysate of the cultured microorganism can be centrifuged to obtain a supernatant. The resulting supernatant can then be applied to a chromatography column, e.g., a C18 column, and washed with water to remove hydrophilic compounds, followed by elution of the compound(s) of interest with a solvent such as methanol. The compound(s) can then be further purified by preparative HPLC. See also, WO 2009/140394.

[0239] In some embodiments, steviol, one or more steviol glycoside precursors, and/or one or more steviol glycosides are produced by co-culturing of two or more hosts. In some embodiments, one or more hosts, each expressing one or more enzymes involved in the steviol glycoside pathway, produce steviol, one or more steviol glycoside precursors, and/or one or more steviol glycosides. For example, a host expressing a gene encoding a polypeptide capable of synthesizing GGPP from FPP and IPP; a gene encoding a polypeptide capable of synthesizing ent-copalyl diphosphate from GGPP; a gene encoding a polypeptide capable of synthesizing ent-kaurene from ent-copalyl diphosphate; a gene encoding a polypeptide capable of synthesizing ent-kaurenoic acid, ent-kaurenol, and/or ent-kaurenal from ent-kaurene; a gene encoding a polypeptide capable of reducing cytochrome P450 complex; a gene encoding a polypeptide capable of synthesizing steviol from ent-kaurenoic acid; and/or a gene encoding a bifunctional polypeptide capable of synthesizing ent-copalyl diphosphate from GGPP and synthesizing ent-kaurene from ent-copalyl diphosphate and a host expressing a gene encoding a polypeptide capable of glycosylating steviol or a steviol glycoside at its C-13 hydroxyl group; a gene encoding a polypeptide capable of beta 1,3 glycosylation of the C3′ of the 13-O-glucose, 19-O-glucose, or both 13-O-glucose and 19-O-glucose of a steviol glycoside; a gene encoding a polypeptide capable of glycosylating steviol or a steviol glycoside at its C-19 carboxyl group; and/or a gene encoding a polypeptide capable of beta 1,2 glycosylation of the C2′ of the 13-O-glucose, 19-O-glucose, or both 13-O-glucose and 19-O-glucose of a steviol glycoside, produce one or more steviol glycosides.

[0240] In some embodiments, polypeptides capable of glycosylating steviol or a steviol glycoside at its C-19 carboxyl group in vitro, in a recombinant host (i.e., in vivo) or by whole cell bioconversion include functional homologs of UGT74G1 (SEQ ID NO:4) (i.e., UGT74G1 homologs). In some embodiments, polypeptides capable of glycosylating a steviol precursor, e.g., ent-kaurenoic acid at its C-19 carboxyl group and/or ent-kaurenol at its C-19 hydroxyl group in vitro, in a recombinant host, or by whole cell bioconversion include functional homologs of UGT74G1 (SEQ ID NO:4). In some embodiments, polypeptides capable of glycosylating a steviol precursor, e.g., ent-kaurenol, at its C-19 carboxyl group in vitro, in a recombinant host (i.e., in vivo) or by whole cell bioconversion include functional homologs of a polypeptide capable of glycosylating steviol or a steviol glycoside at its C-13 hydroxyl group (e.g., UGT85C2 polypeptide; SEQ ID NO:7).

[0241] In some embodiments, polypeptides suitable for producing (i.e., capable of synthesizing) steviol glycosides and/or glycosides of steviol precursors, such as 13-SMG, steviol-1,2-bioside, rubusoside, RebB, RebA, RebE, RebD, RebM, 19-SMG, steviol-1,3-bioside, 1,2-stevioside, 1,3-stevioside, steviol+4GLc (#26 and/or #33), steviol+5Glc (#24 and/or #25), steviol +6Glc (isomer 1 and/or #23), steviol+7Glc (isomer 2 and/or isomer 5), ent-kaurenoic acid+2Glc (#7), ent-kaurenoic acid+3Glc (isomer 1 and/or isomer 2), and/or ent-kaurenol+3Glc (isomer 1 and/or isomer 2), in vitro, in a recombinant host, or by whole cell bioconversion include functional homologs of UGT74G1 (SEQ ID NO:4), such as UGT74G1 Var_1 (SEQ ID NO:118), UGT74G1 Var_2 (SEQ ID NO:120), UGT74G1 Var_3 (SEQ ID NO:122), UGT74G1 Var_4 (SEQ ID NO:124), UGT74G1 Var_5 (SEQ ID NO:126), UGT74G1 Var_6 (SEQ ID NO:128), UGT74G1 Var_7 (SEQ ID NO:130), UGT74G1 Var_8 (SEQ ID NO:161), UGT74G1 Var_9 (SEQ ID NO:163), UGT74G1 Var_10 (SEQ ID NO:165), UGT74G1 Var_11 (SEQ ID NO:167), and UGT74G1 Var_12 (SEQ ID NO:169).

[0242] In some embodiments, a useful UGT74G1 functional homolog can have one or more amino acid substitutions corresponding to residues 18, 20, 21, 23, 79, 80, 81, 82, 83, 85, 86, 119, 140, 148, 179, 184, 185, 191, 194, 195, 284, 285, 286, 375, 376, 377, or 378 of SEQ ID NO:4. See, Table 2, below. Non-limiting examples of useful UGT74G1 homologs include polypeptides having substitutions (with respect to SEQ ID NO:4) corresponding to residue 79 (e.g., a valine or a glutamic acid corresponding to residue 79); 80 (e.g., a cysteine corresponding to residue 80); 81 (e.g., a tryptophan corresponding to residue 81); 83 (e.g., a lysine corresponding to residue 83); 184 (e.g., a valine or a threonine corresponding to residue 184); 260 (e.g., a threonine corresponding to residue 260); 286 (e.g., a cysteine, an asparagine, a threonine, or a glutamic acid corresponding to residue 286); or 377 (e.g., a glutamine corresponding to residue 377).

[0243] In some embodiments, a useful UGT74G1 homolog can have one or more amino acid substitutions corresponding to residues located within A68-E83 region of SEQ ID NO:4, i.e., one or more amino acid substitutions corresponding to residue 68, 69, 70, 71, 72, 73, 74, 75, 76, 77, 78, 79, 80, 81, 82, or 83 of SEQ ID NO:4.

[0244] In some embodiments, polypeptides capable of glycosylating steviol or a steviol glycoside at its C-19 carboxyl group (e.g., UGT74G1 homologs) further comprise a tag, e.g., a tag having the amino acid sequence set forth in SEQ ID NO:152, SEQ ID NO:153, SEQ ID NO:154, or SEQ ID NO:155.

[0245] In some embodiments, a recombinant host expressing one or more UGT74G1 variants not limited to UGT74G1 Var_10 (SEQ ID NO:165) or UGT74G1 Var_11 (SEQ ID NO:167) accumulates ent-kaurenoic acid+2Glc (#7) in vivo and/or via whole cell bioconversion. In some embodiments, a recombinant host expressing one or more UGT74G1 variants not limited to UGT74G1 Var_10 (SEQ ID NO:165) or UGT74G1 Var_11 (SEQ ID NO:167) accumulates ent-kaurenoic acid+3Glc (isomer 1) in vivo and/or via whole cell bioconversion.

[0246] In some embodiments, a recombinant host expressing one or more UGT74G1 variants not limited to UGT74G1 Var_1 (SEQ ID NO:118), UGT74G1 Var_2 (SEQ ID NO:120), UGT74G1 Var_4 (SEQ ID NO:124), UGT74G1 Var_5 (SEQ ID NO:126), UGT74G1 Var_6 (SEQ ID NO:128), UGT74G1 Var_10 (SEQ ID NO:165), or UGT74G1 Var_11 (SEQ ID NO:167) accumulates ent-kaurenoic acid+3Glc (isomer 2) in vivo and/or via whole cell bioconversion. In some embodiments, a recombinant host expressing one or more UGT74G1 variants not limited to UGT74G1 Var_1 (SEQ ID NO:118) accumulates ent-kaurenol+2Glc (#8) in vivo and/or via whole cell bioconversion.

[0247] In some embodiments, a recombinant host expressing one or more UGT74G1 variants not limited to UGT74G1 Var_2 (SEQ ID NO:120), UGT74G1 Var_3 (SEQ ID NO:122), UGT74G1 Var_4 (SEQ ID NO:124), UGT74G1 Var_5 (SEQ ID NO:126), UGT74G1 Var_6 (SEQ ID NO:128), or UGT74G1 Var_7 (SEQ ID NO:130) accumulates ent-kaurenol+3Glc (isomer 1 and isomer 2) in vivo and/or via whole cell bioconversion.

[0248] In some embodiments, a recombinant host expressing one or more UGT74G1 variants not limited to UGT74G1 Var_3 (SEQ ID NO:122), UGT74G1 Var_4 (SEQ ID NO:124), UGT74G1 Var_5 (SEQ ID NO:126), UGT74G1 Var_6 (SEQ ID NO:128), UGT74G1 Var_7 (SEQ ID NO:130), UGT74G1 Var_8 (SEQ ID NO:161), UGT74G1 Var_9 (SEQ ID NO:163), UGT74G1 Var_10, or UGT74G1 Var_11 (SEQ ID NO:167) accumulates 13-SMG in vivo and/or via whole cell bioconversion. In some embodiments, a recombinant host expressing one or more UGT74G1 variants not limited to UGT74G1 Var_3 (SEQ ID NO:122) or UGT74G1 Var_9 (SEQ ID NO:163) accumulates steviol-1,2-bioside in vivo and/or via whole cell bioconversion.

[0249] In some embodiments, a recombinant host expressing one or more UGT74G1 variants not limited to UGT74G1 Var_1 (SEQ ID NO:118) or UGT74G1 Var_3 (SEQ ID NO:122) accumulates steviol-1,3-bioside in vivo and/or via whole cell bioconversion. In some embodiments, a recombinant host expressing one or more UGT74G1 variants not limited to UGT74G1 Var_1 (SEQ ID NO:118), UGT74G1 Var_2 (SEQ ID NO:120), UGT74G1 Var_4 (SEQ ID NO:124), UGT74G1 Var_5 (SEQ ID NO:126), UGT74G1 Var_6 (SEQ ID NO:128), UGT74G1 Var_7 (SEQ ID NO:130), UGT74G1 Var_8 (SEQ ID NO:161), UGT74G1 Var_9 (SEQ ID NO:163), UGT74G1 Var_10 (SEQ ID NO:165), or UGT74G1 Var_11 (SEQ ID NO:167) accumulates rubusoside in vivo and/or via whole cell bioconversion.

[0250] In some embodiments, a recombinant host expressing one or more UGT74G1 variants not limited to UGT74G1 Var_6 (SEQ ID NO:128), UGT74G1 Var_7 (SEQ ID NO:130), UGT74G1 Var_8 (SEQ ID NO:161), or UGT74G1 Var_9 (SEQ ID NO:163) accumulates 1,2-stevioside in vivo and/or via whole cell bioconversion.

[0251] In some embodiments, a recombinant host expressing one or more UGT74G1 variants not limited to UGT74G1 Var_3 (SEQ ID NO:122), UGT74G1 Var_4 (SEQ ID NO:124), UGT74G1 Var_5 (SEQ ID NO:126), UGT74G1 Var_6 (SEQ ID NO:128), UGT74G1 Var_7 (SEQ ID NO:130), UGT74G1 Var_8 (SEQ ID NO:161), UGT74G1 Var_9 (SEQ ID NO:163), UGT74G1 Var_10 (SEQ ID NO:165), or UGT74G1 Var_11 (SEQ ID NO:167) accumulates RebB in vivo and/or via whole cell bioconversion.

[0252] In some embodiments, a recombinant host expressing one or more UGT74G1 variants not limited to UGT74G1 Var_4 (SEQ ID NO:124), UGT74G1 Var_6 (SEQ ID NO:128), UGT74G1 Var_7 (SEQ ID NO:130), UGT74G1 Var_8 (SEQ ID NO:161), UGT74G1 Var_9 (SEQ ID NO:163), or UGT74G1 Var_10 (SEQ ID NO:165) accumulates RebA in vivo and/or via whole cell bioconversion.

[0253] In some embodiments, a recombinant host expressing one or more UGT74G1 variants not limited to UGT74G1 Var_2 (SEQ ID NO:120) or UGT74G1 Var_4 (SEQ ID NO:124) accumulates RebE in vivo and/or via whole cell bioconversion.

[0254] In some embodiments, a recombinant host expressing one or more UGT74G1 variants not limited to UGT74G1 Var_1 (SEQ ID NO:118), UGT74G1 Var_2 (SEQ ID NO:120), UGT74G1 Var_4 (SEQ ID NO:124), UGT74G1 Var_5 (SEQ ID NO:126), UGT74G1 Var_6 (SEQ ID NO:128), UGT74G1 Var_9 (SEQ ID NO:163), UGT74G1 Var_10 (SEQ ID NO:165), or UGT74G1 Var_11 (SEQ ID NO:167) accumulates steviol+4Glc (#26) in vivo and/or via whole cell bioconversion.

[0255] In some embodiments, a recombinant host expressing one or more UGT74G1 variants not limited to UGT74G1 Var_3 (SEQ ID NO:122), UGT74G1 Var_7 (SEQ ID NO:130), UGT74G1 Var_8 (SEQ ID NO:161), UGT74G1 Var_9 (SEQ ID NO:163), or UGT74G1 Var_11 (SEQ ID NO:167) accumulates steviol+4Glc (#33) in vivo and/or via whole cell bioconversion.

[0256] In some embodiments, a recombinant host expressing one or more UGT74G1 variants not limited to UGT74G1 Var_7 (SEQ ID NO:130), UGT74G1 Var_8 (SEQ ID NO:161), UGT74G1 Var_9 (SEQ ID NO:163), or UGT74G1 Var_11 (SEQ ID NO:167) accumulates RebD in vivo and/or via whole cell bioconversion.

[0257] In some embodiments, a recombinant host expressing one or more UGT74G1 variants not limited to UGT74G1 Var_1 (SEQ ID NO:118), UGT74G1 Var_9 (SEQ ID NO:163), or UGT74G1 Var_11 (SEQ ID NO:167) accumulates steviol+5Glc (#24) in vivo and/or via whole cell bioconversion.

[0258] In some embodiments, a recombinant host expressing one or more UGT74G1 variants not limited to UGT74G1 Var_8 (SEQ ID NO:161), UGT74G1 Var_9 (SEQ ID NO:163), or UGT74G1 Var_10 (SEQ ID NO:165) accumulates steviol+5Glc (#25) in vivo and/or via whole cell bioconversion.

[0259] In some embodiments, a recombinant host expressing one or more UGT74G1 variants not limited to UGT74G1 Var_2 (SEQ ID NO:120), UGT74G1 Var_4 (SEQ ID NO:124), UGT74G1 Var_6 (SEQ ID NO:128), UGT74G1 Var_7 (SEQ ID NO:130), UGT74G1 Var_8 (SEQ ID NO:161), UGT74G1 Var_9 (SEQ ID NO:163), UGT74G1 Var_10 (SEQ ID NO:165), or UGT74G1 Var_11 (SEQ ID NO:167) accumulates RebM in vivo and/or via whole cell bioconversion.

[0260] In some embodiments, a recombinant host expressing one or more UGT74G1 variants not limited to UGT74G1 Var_7 (SEQ ID NO:122) or UGT74G1 Var_10 (SEQ ID NO:165) accumulates steviol+6Glc (#23) in vivo and/or via whole cell bioconversion.

[0261] In some embodiments, a recombinant host expressing one or more UGT74G1 variants not limited to, UGT74G1 Var_7 (SEQ ID NO:130), UGT74G1 Var_8 (SEQ ID NO:161), UGT74G1 Var_9 (SEQ ID NO:163), UGT74G1 Var_11 (SEQ ID NO:167) accumulates steviol+7Glc (isomer 2) in vivo and/or via whole cell bioconversion.

[0262] In some embodiments, a recombinant host expressing one or more UGT74G1 variants not limited to UGT74G1 Var_1 (SEQ ID NO:118), UGT74G1 Var_2 (SEQ ID NO:120), UGT74G1 Var_5 (SEQ ID NO:126), UGT74G1 Var_7 (SEQ ID NO:130) or UGT74G1 Var_9 (SEQ ID NO:163) accumulates steviol+7Glc (isomer 5) in vivo and/or via whole cell bioconversion. See, Tables 4-6 and 8-10.

[0263] In some embodiments, expression of UGT74G1 variants that increase accumulation of steviol glycosides and/or glycosides of steviol precursors in a recombinant host, e.g., a steviol-glycoside producing S. cerevisiae strain (see WO 2014/122227, which has been incorporated by reference in its entirety), alter accumulation of ent-kaurenoic acid+2Glc (#7), ent-kaurenoic acid+3Glc (isomer 1 and/or isomer 2), ent-kaurenol+2Glc (#8), ent-kaurenol+3Glc (isomer 1 and/or isomer 2), 13-SMG, 19-SMG, steviol-1,2-bioside, steviol-1,3-bioside, rubusoside, 1,2-stevioside, RebB, RebA, RebE, RebD, RebM, steviol+4Glc (#26 and/or #33), steviol+5Glc (#24 and/or #25), steviol+6Glc (isomer 1), steviol+6Glc (#23), and steviol+7Glc (isomer 2 and/or isomer 5) compared to expression of wild-type UGT74G1 (SEQ ID NO:4) in a recombinant host (e.g. expression of wild-type UGT74G1 in a steviol glycoside-producing S. cerevisiae strain).

[0264] In some embodiments, expression of UGT74G1 variants that decrease and/or increase ent-kaurenoic acid+2Glc (#7) accumulation by a recombinant host, e.g., S. cerevisiae, also results in increased accumulation of ent-kaurenoic acid+3Glc (isomer 1), ent-kaurenoic acid+3Glc (isomer 2), 13-SMG, rubusoside, 1,3-stevioside, RebB, RebA, RebD, RebM, steviol+4Glc (#26), steviol+4Glc (#33), steviol+5Glc (#24), steviol+5Glc (#25), steviol+6Glc (isomer 1), steviol+6Glc (#23), and/or steviol+7Glc (isomer 2), but decreased accumulation of RebA, RebD, 1,2-stevioside, steviol+4Glc (#33), steviol+5Glc (#25), steviol+7Glc (isomer 2), and/or steviol+7Glc (isomer 5).

[0265] In some embodiments, expression of UGT74G1 variants that increase ent-kaurenoic acid+3Glc (isomer 1) accumulation by a recombinant host, e.g., S. cerevisiae, also results in increased accumulation of ent-kaurenoic acid+2Glc (#7), ent-kaurenoic acid+3Glc (isomer 2), 13-SMG, rubusoside, 1,3-stevioside, RebB, RebA, RebD, RebM, steviol+4Glc (#26), steviol+4Glc (#33), steviol+5Glc (#24), steviol+5Glc (#25), steviol+6Glc (isomer 1), steviol+6Glc (#23), and/or steviol+7Glc (isomer 2), but decreased accumulation of RebA, RebD, 1,2-stevioside, steviol+4Glc (#33), steviol+5Glc (#25), steviol+7Glc (isomer 2), and/or steviol+7Glc (isomer 5).

[0266] In some embodiments, expression of UGT74G1 variants that increase ent-kaurenoic acid+3Glc (isomer 2) accumulation by a recombinant host, e.g. S. cerevisiae, also results in increased accumulation of ent-kaurenoic acid+2Glc (#7), ent-kaurenol+2Glc (#8), ent-kaurenol+3Glc (isomer 1 and/or isomer 2), ent-kaurenoic acid+3Glc (isomer 1), 13-SMG, steviol-1,3-bioside, rubusoside, 1,2-stevioside, 1,3-stevioside, RebB, RebA, RebD, RebE, steviol+4Glc (#26), steviol+4Glc (#33), steviol+5Glc (#24), steviol+5Glc (#25), RebM, steviol+6Glc (isomer 1), steviol+6Glc (#23), steviol+7Glc (isomer 2), and/or steviol+7Glc (isomer 5) but decreased accumulation of ent-kaurenoic acid+2Glc (#7), steviol+6Glc (isomer 1), RebA, RebD, 1,2-stevioside, steviol+4Glc (#33), steviol+5Glc (#25), steviol+7Glc (isomer 2), and/or steviol+7Glc (isomer 5).

[0267] In some embodiments, expression of a functional homolog of a polypeptide capable of glycosylating steviol or a steviol glycoside at its C-13 hydroxyl group (e.g., a UGT85C2 polypeptide) and/or a functional homolog of a bifunctional polypeptide capable of glycosylating steviol or a steviol glycoside at its C-19 carboxyl group and glycosylating steviol or a steviol glycoside at its C-13 hydroxyl group (e.g., a UGT74G1-b-UGT85C2 and/or UGT85C2-b-UGT74G1 chimeric enzyme) that increases ent-kaurenol+2Glc (#8) accumulation by a recombinant host also results in increased accumulation of ent-kaurenoic acid+3Glc (isomer 2), steviol-1,3-bioside, rubusoside, steviol+4Glc (#26), steviol+5Glc (#24), and/or steviol+7Glc (isomer 5) but decreased accumulation of steviol+6Glc (isomer 1).

[0268] In some embodiments, expression of a functional homolog of a bifunctional polypeptide capable of glycosylating steviol or a steviol glycoside at its C-19 carboxyl group and glycosylating steviol or a steviol glycoside at its C-13 hydroxyl group (e.g., a UGT74G1-b-UGT85C2 and/or UGT85C2-b-UGT74G1 chimeric enzyme) that increases ent-kaurenol+3Glc (isomer 1 and/or isomer 2) accumulation by a recombinant host also results in increased accumulation of ent-kaurenoic acid+3Glc (isomer 2), 13-SMG, steviol-1,2-bioside, steviol-1,3-bioside, rubusoside, 1,2-stevioside, RebB, RebA, RebE, steviol+4Glc (#26 and/or #33), RebD, RebM, steviol+6Glc (#23), and/or steviol+7Glc (isomer 2 and/or isomer 5) but decreased accumulation of ent-kaurenoic acid+2Glc (#7), ent-kaurenoic acid+3Glc (isomer 1 and/or isomer 2), 19-SMG, 1,2-stevioside, RebA, steviol+4Glc (#26), RebD, steviol+5Glc (#24 and/or #25), steviol+6Glc (isomer 1), RebM, and/or steviol+7Glc (isomer 2 and/or isomer 5).

[0269] In some embodiments, expression of UGT74G1 variants that increase 13-SMG accumulation by a recombinant host also results in increased accumulation of ent-kaurenoic acid+2Glc (#7), ent-kaurenoic acid+3Glc (isomer 1), ent-kaurenoic acid+3Glc (isomer 2), ent-kaurenol+3Glc (isomer 1 and/or isomer 2), steviol-1,2-bioside, steviol-1,3-bioside, rubusoside, 1,2-stevioside, RebB, RebE, RebA, steviol+4Glc (#26 and/or #33), RebM, RebD, steviol+5Glc (#24 and/or #25), steviol+6Glc (isomer 1), steviol+6Glc (#23), steviol+7Glc (isomer 2) and/or steviol+7Glc (isomer 5) but decreased accumulation of ent-kaurenoic acid+2Glc (#7), ent-kaurenoic acid+3Glc (isomer 1 and/or isomer 2), 19-SMG, 1,2-stevioside, RebA, steviol+4Glc (#26), steviol+4Glc (#33), RebD, steviol+5Glc (#24 and/or #25), steviol+6Glc (isomer 1), RebM, and/or steviol+7Glc (isomer 2 and/or isomer 5).

[0270] In some embodiments, expression of UGT74G1 variants that increase steviol-1,2-bioside accumulation by a recombinant host also results in increased accumulation of ent-kaurenol+3Glc (isomer 1 and/or isomer 2), 13-SMG, steviol-1,3-bioside, rubusoside, 1,2-stevioside, 1,3-stevioside, RebB, RebA, RebD, RebM, steviol+4Glc (#26), steviol+4Glc (#33), steviol+5Glc (#24 and/or #25), steviol+6Glc (isomer 1), and/or steviol+7Glc (isomer 2 and/or isomer 5), but decreased accumulation of ent-kaurenoic acid+2Glc (#7), ent-kaurenoic acid+3Glc (isomer 1 and/or isomer 2), 19-SMG, 1,2-stevioside, RebA, steviol+4Glc (#26), RebD, steviol+5Glc (#24 and/or #25), steviol+6Glc (isomer 1), RebM, and/or steviol+7Glc (isomer 2 and/or isomer 5).

[0271] In some embodiments, expression of UGT74G1 variants that increase steviol-1,3-bioside accumulation by a recombinant host also results in increased accumulation of ent-kaurenoic acid+3Glc (isomer 2), ent-kaurenol+2Glc (#8), ent-kaurenol+3Glc (isomer 1 and/or isomer 2), 13-SMG, steviol-1,2-bioside, rubusoside, RebB, steviol+4Glc (#26 and/or #33), steviol+5Glc (#24), and/or steviol+7Glc (isomer 5) but decreased accumulation of ent-kaurenoic acid+2Glc (#7), ent-kaurenoic acid+3Glc (isomer 1 and/or isomer 2), 19-SMG, 1,2-stevioside, RebA, steviol+4Glc (#26), RebD, steviol+5Glc (#24 and/or #25), steviol+6Glc (isomer 1), RebM, and/or steviol+7Glc (isomer 2 and/or isomer 5).

[0272] In some embodiments, expression of UGT74G1 variants that increase rubusoside accumulation by a recombinant host also results in increased accumulation of ent-kaurenoic acid+2Glc (#7), ent-kaurenoic acid+3Glc (isomer 1), ent-kaurenoic acid+3Glc (isomer 2), ent-kaurenol+2Glc (#8), ent-kaurenol+3Glc (isomer 1 and/or isomer 2), 13-SMG, steviol-1,2-bioside, steviol-1,3-bioside, 1,2-stevioside, 1,3-stevioside, RebB, RebA, RebE, steviol+4Glc (#26 and/or #33), RebD, steviol+5Glc (#24 and/or #25), steviol+6Glc (isomer 1), RebM, steviol+6Glc (#23), and/or steviol+7Glc (isomer 2 and/or isomer 5) but decreased accumulation of ent-kaurenoic acid+2Glc (#7), ent-kaurenoic acid+3Glc (isomer 1 and/or isomer 2), 19-SMG, RebA, RebD, 1,2-stevioside, steviol+4Glc (#33) steviol+5Glc (#24 and/or #25), and/or steviol+7Glc (isomer 2 and/or isomer 5).

[0273] In some embodiments, expression of UGT74G1 variants that increase 1,2-stevioside accumulation by a recombinant host also results in increased accumulation of ent-kaurenoic acid+3Glc (isomer 2), ent-kaurenol+3Glc (isomer 1 and/or isomer 2), 13-SMG, steviol-1,2-bioside, 1,3-stevioside, rubusoside, RebB, RebA, steviol+4Glc (#26 and/or #33), steviol+5Glc (#24 and/or #25), RebD, RebM, steviol+6Glc (isomer 1 and/or #23), and/or steviol+7Glc (isomer 2 and/or isomer 5) but decreased accumulation of ent-kaurenoic acid+2Glc (#7), ent-kaurenoic acid+3Glc (isomer 1 and/or isomer 2), 19-SMG, steviol+4Glc (#26), steviol+5Glc (#24), and/or steviol+7Glc (isomer 5).

[0274] In some embodiments, expression of UGT74G1 variants that increase 1,3-stevioside accumulation by a recombinant host also results in increased accumulation of ent-kaurenoic acid+2Glc (#7), ent-kaurenoic acid+3Glc (isomer 1 and/or isomer 2), 13-SMG, steviol-1,2-bioside, rubusoside, RebB, RebA, RebD, RebM, 1,2-stevioside, steviol+4Glc (#26 and/or #33), steviol+5Glc (#24 and/or #25), steviol+6Glc (isomer 1 and/or #23), and/or steviol+7Glc (isomer 2 and/or isomer 5), but decreased accumulation of ent-kaurenoic acid+2Glc (#7), ent-kaurenoic acid+3Glc (isomer 1 and/or isomer 2), 19-SMG, RebD, 1,2-stevioside, steviol+4Glc (#26 and/or #33), steviol+5Glc (#24), steviol+7Glc (isomer 2).

[0275] In some embodiments, expression of UGT74G1 variants that increase RebB accumulation by a recombinant host also results in increased accumulation of ent-kaurenoic acid+2Glc (#7), ent-kaurenoic acid+3Glc (isomer 1 and/or isomer 2), ent-kaurenol+3Glc (isomer 1 and/or isomer 2), 13-SMG, steviol-1,2-bioside, steviol-1,3-bioside, rubusoside, 1,2-stevioside, RebE, RebA, steviol+4Glc (#26 and/or #33), RebD, RebM, steviol+5Glc (#24 and/or #25), steviol+6Glc (isomer 1), steviol+6Glc (#23), and steviol+7Glc (isomer 2 and/or isomer 5) but decreased accumulation of ent-kaurenoic acid+2Glc (#7), ent-kaurenoic acid+3Glc (isomer 1 and/or isomer 2), 19-SMG, 1,2-stevioside, RebA, steviol+4Glc (#26 and/or #33), RebD, steviol+5Glc (#24 and/or #25), steviol+6Glc (isomer 1), and/or steviol+7Glc (isomer 2 and/or isomer 5).

[0276] In some embodiments, expression of UGT74G1 variants that increase RebA accumulation by a recombinant host also results in increased accumulation of ent-kaurenoic acid+2Glc (#7), ent-kaurenoic acid+3Glc (isomer 1), ent-kaurenoic acid+3Glc (isomer 2), ent-kaurenol+3Glc (isomer 1 and/or isomer 2), 13-SMG, rubusoside, 1,2-stevioside, 1,3-stevioside, steviol-1,2-bioside, RebB, RebE, steviol+4Glc (#26 and/or #33), steviol+5Glc (#24 and/or #25) RebD, RebM, steviol+6Glc (isomer 1 and/or #23), and/or steviol+7Glc (isomer 2 and/or isomer 5) but decreased accumulation of ent-kaurenoic acid+2Glc (#7), ent-kaurenoic acid+3Glc (isomer 1 and/or isomer 2), 19-SMG, RebD, 1,2-stevioside, steviol+4Glc (#26 and/or #33), steviol+5Glc (#24), and/or steviol+7Glc (isomer 2 and/or isomer 5).

[0277] In some embodiments, expression of UGT74G1 variants that increase RebE accumulation by a recombinant host also results in increased accumulation of ent-kaurenoic acid+3Glc (isomer 2), ent-kaurenol+3Glc (isomer 1 and/or isomer 2), 13-SMG, rubusoside, RebB, RebA, steviol+4Glc (#26), RebM, and/or steviol+7Glc (isomer 5) but decreased accumulation of ent-kaurenoic acid+2Glc (#7) and/or steviol+7Glc (isomer 5).

[0278] In some embodiments, expression of UGT74G1 variants that increase steviol+4Glc (#26) accumulation by a recombinant host results in increased accumulation of ent-kaurenoic acid+2Glc (#7), ent-kaurenoic acid+3Glc (isomer 1), ent-kaurenoic acid+3Glc (isomer 2), ent-kaurenol+2Glc (#8), ent-kaurenol+3Glc (isomer 1 and/or isomer 2), 13-SMG, steviol-1,2-bioside, steviol-1,3-bioside, rubusoside, 1,2-stevioside, RebB, RebA, RebE, steviol+4Glc #33), steviol+5Glc (#24 and/or #25), steviol+6Glc (isomer 1 and/or #23), RebM, RebD, steviol+7Glc (isomer 2 and/or isomer 5) but decreased accumulation of ent-kaurenoic acid+2Glc (#7), ent-kaurenoic acid+3Glc (isomer 1 and/or isomer 2), 19-SMG, RebA, RebD, 1,2-stevioside, steviol+4Glc (#33), steviol+5Glc (#25) steviol+6Glc (isomer 1), and/or steviol+7Glc (isomer 2 and/or isomer 5).

[0279] In some embodiments, expression of UGT74G1 variants that increase steviol+4Glc (#33) accumulation by a recombinant host results in increased accumulation of ent-kaurenoic acid+2Glc (#7), ent-kaurenoic acid+3Glc (isomer 1), ent-kaurenoic acid+3Glc (isomer 2), ent-kaurenol+3Glc (isomer 1 and/or isomer 2), 13-SMG, steviol-1,2-bioside, steviol-1,3-bioside, rubusoside, 1,2-stevioside, 1,3-stevioside, RebB, RebA, steviol+4Glc (#26), steviol+5Glc (#24 and/or #25), RebD, RebM, steviol+6Glc (isomer 1 and/or #23), and/or steviol+7Glc (isomer 2 and/or isomer 5) but decreased accumulation of ent-kaurenoic acid+2Glc (#7), ent-kaurenoic acid+3Glc (isomer 1 and/or isomer 2), 19-SMG, 1,2-stevioside, RebA, steviol+4Glc (#26), RebD, steviol+5Glc (#24 and/or #25), steviol+6Glc (isomer 1), RebM, and/or steviol+7Glc (isomer 2 and/or isomer 5).

[0280] In some embodiments, expression of UGT74G1 variants that increase RebD accumulation by a recombinant host results in increased accumulation of ent-kaurenoic acid+2Glc (#7), ent-kaurenoic acid+3Glc (isomer 1 and/or isomer 2), ent-kaurenol+3Glc (isomer 1 and/or isomer 2), ent-kaurenol+3Glc (isomer 1 and/or isomer 2), 13-SMG, rubusoside, steviol-1,2-bioside, 1,2-stevioside, 1,3-stevioside, RebB, RebA, steviol+4Glc (#26 and/or #33), RebM, steviol+5Glc (#24 and/or #25), steviol+6Glc (isomer 1 and/or #23), steviol+7Glc (isomer 2 and/or isomer 5) but decreased accumulation of ent-kaurenoic acid+2Glc (#7), ent-kaurenoic acid+3Glc (isomer 1 and/or isomer 2), 19-SMG, RebA, steviol+4Glc (#26), steviol+5Glc (#24 and/or #25), and/or steviol+7Glc (isomer 5).

[0281] In some embodiments, expression of UGT74G1 variants that increase steviol+5Glc (#24) accumulation by a recombinant host results in increased accumulation of ent-kaurenoic acid+2Glc (#7), ent-kaurenoic acid+3Glc (isomer 1 and/or isomer 2), 13-SMG, ent-kaurenol+2Glc (#8), steviol-1,2-bioside, steviol-1,3-bioside, rubusoside, 1,2-stevioside, 1,3-stevioside, RebB, RebA, RebD, RebM, steviol+4Glc (#26 and/or #33), steviol+5Glc (#25), steviol+6Glc (isomer 1), and/or steviol+7Glc (isomer 2 and/or isomer 5) but decreased accumulation of ent-kaurenoic acid+2Glc (#7), ent-kaurenoic acid+3Glc (isomer 1 and/or isomer 2), 19-SMG, RebA, 1,2-stevioside, steviol+5Glc (#24 and/or #25), steviol+6Glc (isomer 1), and/or steviol+7Glc (isomer 5).

[0282] In some embodiments, expression of UGT74G1 variants that increase steviol+5Glc (#25) accumulation by a recombinant host also results in increased accumulation of ent-kaurenoic acid+2Glc (#7), ent-kaurenoic acid+3Glc (isomer 1 and/or isomer 2), 13-SMG, steviol-1,2-bioside, rubusoside, RebB, RebA, RebD, RebM, 1,2-stevioside, 1,3-stevioside, steviol+4Glc (#26 and/or #33), steviol+5Glc (#24), steviol+6Glc (isomer 1 and/or #23), and/or steviol+7Glc (isomer 2 and/or isomer 5), but decreased accumulation of ent-kaurenoic acid+2Glc (#7), ent-kaurenoic acid+3Glc (isomer 1 and/or isomer 2), 19-SMG, RebD, 1,2-stevioside, steviol+4Glc (#26 and/or #33), steviol+5Glc (#24), steviol+7Glc (isomer 2).

[0283] In some embodiments, expression of UGT74G1 variants that increase RebM accumulation by a recombinant host results in increased accumulation of ent-kaurenoic acid+2Glc (#7), ent-kaurenoic acid+3Glc (isomer 1 and/or isomer 2), ent-kaurenol+3Glc (isomer 1 and/or isomer 2), 13-SMG, rubusoside, 1,2-stevioside, 1,3-stevioside, steviol-1,2-bioside, RebB, RebA, RebE, steviol+4Glc (#26 and/or #33), RebD, steviol+5Glc (#24 and/or #25) steviol+6Glc (isomer 1 and/or #23), and/or steviol+7Glc (isomer 2 and/or isomer 5) but decreased accumulation of ent-kaurenoic acid+2Glc (#7), ent-kaurenoic acid+3Glc (isomer 1 and/or isomer 2), 19-SMG, RebA, RebD, 1,2-stevioside, steviol+4Glc (#33), steviol+5Glc (#24 and/or #25), and/or steviol+7Glc (isomer 2 and/or isomer 5).

[0284] In some embodiments, expression of UGT74G1 variants that increase steviol+6Glc (isomer 1) accumulation by a recombinant host results in increased ent-kaurenoic acid+2Glc (#7), ent-kaurenoic acid+3Glc (isomer 1 and/or isomer 2), 13-SMG, steviol-1,2-bioside, rubusoside, 1,3-stevioside, RebB, RebA, RebD, RebM, 1,2-stevioside, steviol+4Glc (#26 and/or #33), steviol+5Glc (#24 and/or #25), steviol+6Glc (#23), and/or steviol+7Glc (isomer 2 and/or isomer 5), but decreased accumulation of ent-kaurenoic acid+2Glc (#7), ent-kaurenoic acid+3Glc (isomer 1 and/or isomer 2), 13-SMG, 19-SMG, steviol-1,2-bioside, rubusoside, 1,3-stevioside, RebB, RebA, RebD, RebM, 1,2-stevioside, steviol+4Glc (#26 and/or #33), steviol+5Glc (#24 and/or #25), and/or steviol+7Glc (isomer 2 and/or isomer 5).

[0285] In some embodiments, expression of UGT74G1 variants that increase steviol+6Glc (#23) accumulation by a recombinant host results in increased ent-kaurenoic acid+2Glc (#7), ent-kaurenoic acid+3Glc (isomer 1 and/or isomer 2), ent-kaurenol+3Glc (isomer 1 and/or isomer 2), 13-SMG, rubusoside, 1,2-stevioside, 1,3-stevioside, RebB, RebA, steviol+4Glc (#26 and/or #33), steviol+5Glc (#25), RebM, steviol+6Glc (isomer 1), steviol+7Glc (isomer 2 and/or isomer 5) but decreased accumulation of ent-kaurenoic acid+2Glc (#7), ent-kaurenoic acid+3Glc (isomer 1 and/or isomer 2), 19-SMG, RebD, 1,2-stevioside, steviol+4Glc (#33), steviol+5Glc (#24), and/or steviol+7Glc (isomer 2).

[0286] In some embodiments, expression of UGT74G1 variants that increase steviol+7Glc (isomer 2) accumulation by a recombinant host results in increased accumulation of ent-kaurenoic acid+2Glc (#7), ent-kaurenoic acid+3Glc (isomer 1 and/or isomer 2), ent-kaurenol+3Glc (isomer 1 and/or isomer 2), 13-SMG, rubusoside, 1,2-stevioside, 1,3-stevioside, steviol-1,2-bioside, RebB, RebA, steviol+4Glc (#26 and/or #33), steviol+5Glc (#24 and/or #25) RebM, RebD, steviol+6Glc (isomer 1 and/or #23), steviol+7Glc (isomer 2 and/or isomer 5) but decreased accumulation of ent-kaurenoic acid+2Glc (#7), ent-kaurenoic acid+3Glc (isomer 1 and/or isomer 2), 19-SMG, RebA, steviol+4Glc (#26 and/or #33), steviol+5Glc (#24 and/or #25), and/or steviol+7Glc (isomer 5).

[0287] In some embodiments, expression of UGT74G1 variants that increase steviol+7Glc (isomer 5) accumulation by a recombinant host results in increased accumulation of ent-kaurenoic acid+3Glc (isomer 2), ent-kaurenol+2Glc (#8), ent-kaurenol+3Glc (isomer 1 and/or isomer 2), 13-SMG, steviol-1,2-bioside, steviol-1,3-bioside, rubusoside, 1,2-stevioside, RebB, RebA, RebE, steviol+4Glc (#26 and/or #33), RebD, steviol+5Glc (#24 and/or #25), RebM, steviol+6Glc (isomer 1 and/or #23), steviol+7Glc (isomer 2) but decreased accumulation of ent-kaurenoic acid+2Glc (#7), ent-kaurenoic acid+3Glc (isomer 1 and/or isomer 2), 19-SMG, steviol+5Glc (#24), and/or steviol+6Glc (isomer 1).

[0288] In some embodiments, expression of UGT74G1 Var_10 (SEQ ID NO:165) and/or UGT74G1 Var_11 (SEQ ID NO:167) results in increased ent-kaurenoic acid+2Glc (#7) accumulation by a recombinant host. In some embodiments, expression of UGT74G1 Var_10 (SEQ ID NO:165) and/or UGT74G1 Var_11 (SEQ ID NO:167) results in increased ent-kaurenoic acid+3Glc (isomer 1) accumulation by a recombinant host.

[0289] In some embodiments, expression of UGT74G1 Var_1 (SEQ ID NO:118), UGT74G1 Var_2 (SEQ ID NO:120), UGT74G1 Var_4 (SEQ ID NO:124), UGT74G1 Var_5 (SEQ ID NO:126), UGT74G1 Var_6 (SEQ ID NO:128), UGT74G1 Var_10 (SEQ ID NO:165), and/or UGT74G1 Var_11 (SEQ ID NO:167) results in increased ent-kaurenoic acid+3Glc (isomer 2) accumulation by a recombinant host.

[0290] In some embodiments, expression of a functional homolog of a polypeptide capable of glycosylating steviol or a steviol glycoside at its C-13 hydroxyl group (e.g., UGT85C2 polypeptide; SEQ ID NO:7) and/or a functional homolog of a bifunctional polypeptide capable of glycosylating steviol or a steviol glycoside at its C-19 carboxyl group and glycosylating steviol or a steviol glycoside at its C-13 hydroxyl group (UGT74G1-b-UGT85C2 chimeric polypeptide; SEQ ID NO:134, SEQ ID NO:136, SEQ ID NO:144, SEQ ID NO:146, or SEQ ID NO:148 and/or UGT85C2-b-UGT74G1 chimeric polypeptide; SEQ ID NO:132, SEQ ID NO:138, SEQ ID NO:140, or SEQ ID NO:142) results in increased ent-kaurenol+2Glc (#8) accumulation by a recombinant host.

[0291] In some embodiments, expression of a functional homolog of a bifunctional polypeptide capable of glycosylating steviol or a steviol glycoside at its C-19 carboxyl group and glycosylating steviol or a steviol glycoside at its C-13 hydroxyl group (UGT74G1-b-UGT85C2 chimeric polypeptide; SEQ ID NO:134, SEQ ID NO:136, SEQ ID NO:144, SEQ ID NO:146, or SEQ ID NO:148 and/or UGT85C2-b-UGT74G1 chimeric polypeptide; SEQ ID NO:132, SEQ ID NO:138, SEQ ID NO:140, or SEQ ID NO:142) results in increased ent-kaurenol+3Glc (isomer 1 and/or isomer 2) accumulation by a recombinant host.

[0292] In some embodiments, expression of UGT74G1 Var_3 (SEQ ID NO:122), UGT74G1 Var_4 (SEQ ID NO:124), UGT74G1 Var_5 (SEQ ID NO:126), UGT74G1 Var_6 (SEQ ID NO:128), UGT74G1 Var_7 (SEQ ID NO:130), UGT74G1 Var_8 (SEQ ID NO:161), UGT74G1 Var_9 (SEQ ID NO:163), UGT74G1 Var_10 (SEQ ID NO:165), and/or UGT74G1 Var_11 (SEQ ID NO:167) results in increased 13-SMG accumulation by a recombinant host.

[0293] In some embodiments, expression of UGT74G1 Var_3 (SEQ ID NO:122) and/or UGT74G1 Var_9 (SEQ ID NO:163) results in increased steviol-I,2-bioside accumulation by a recombinant host.

[0294] In some embodiments, expression of UGT74G1 Var_1 (SEQ ID NO:118) and/or UGT74G1 Var_3 (SEQ ID NO:122) results in increased steviol-1,3-bioside accumulation by a recombinant host. In some embodiments, expression of UGT74G1 Var_1 (SEQ ID NO:118), UGT74G1 Var_2 (SEQ ID NO:120), UGT74G1 Var_4 (SEQ ID NO:124), UGT74G1 Var_5 (SEQ ID NO:126), UGT74G1 Var_6 (SEQ ID NO:128), UGT74G1 Var_7 (SEQ ID NO:130), UGT74G1 Var_8 (SEQ ID NO:161), UGT74G1 Var_9 (SEQ ID NO:163), UGT74G1 Var_10 (SEQ ID NO:165), and/or UGT74G1 Var_11 (SEQ ID NO:167) results in increased rubusoside accumulation by a recombinant host. In some embodiments, expression of UGT74G1 Var_6 (SEQ ID NO:128), UGT74G1 Var_7 (SEQ ID NO:130), UGT74G1 Var_8 (SEQ ID NO:161), and/or UGT74G1 Var_9 (SEQ ID NO:163) results in increased 1,2-stevioside accumulation by a recombinant host.

[0295] In some embodiments, expression of UGT74G1 Var_3 (SEQ ID NO:122), UGT74G1 Var_4 (SEQ ID NO:124), UGT74G1 Var_5 (SEQ ID NO:126), UGT74G1 Var_6 (SEQ ID NO:128), UGT74G1 Var_7 (SEQ ID NO:130), UGT74G1 Var_8 (SEQ ID NO:161), UGT74G1 Var_9 (SEQ ID NO:163), UGT74G1 Var_10 (SEQ ID NO:165), and/or UGT74G1 Var_11 (SEQ ID NO:167) results in increased RebB accumulation by a recombinant host.

[0296] In some embodiments, expression of UGT74G1 Var_4 (SEQ ID NO:124), UGT74G1 Var_6 (SEQ ID NO:128), UGT74G1 Var_7 (SEQ ID NO:130), UGT74G1 Var_8 (SEQ ID NO:161), UGT74G1 Var_9 (SEQ ID NO:163), and/or UGT74G1 Var_10 (SEQ ID NO:165) results in increased RebA accumulation by a recombinant host.

[0297] In some embodiments, expression of UGT74G1 Var_4 (SEQ ID NO:124) results in increased RebE accumulation by a recombinant host. In some embodiments, expression of UGT74G1 Var_1 (SEQ ID NO:118), UGT74G1 Var_2 (SEQ ID NO:120), UGT74G1 Var_4 (SEQ ID NO:124), UGT74G1 Var_5 (SEQ ID NO:126), UGT74G1 Var_6 (SEQ ID NO:128), UGT74G1 Var_9 (SEQ ID NO:163), UGT74G1 Var_10 (SEQ ID NO:165), and/or UGT74G1 Var_11 (SEQ ID NO:167) results in increased steviol+4Glc (#26) accumulation by a recombinant host. In some embodiments, expression of UGT74G1 Var_3 (SEQ ID NO:122), UGT74G1 Var_7 (SEQ ID NO:130), UGT74G1 Var_8 (SEQ ID NO:161), UGT74G1 Var_9 (SEQ ID NO:163),and/or UGT74G1 Var_11 (SEQ ID NO:167) results in increased steviol+4Glc (#33) accumulation by a recombinant host.

[0298] In some embodiments, expression of UGT74G1 Var_7 (SEQ ID NO:130), UGT74G1 Var_8 (SEQ ID NO:161), UGT74G1 Var_9 (SEQ ID NO:163), and/or UGT74G1 Var_11 (SEQ ID NO:167) results in increased RebD accumulation by a recombinant host.

[0299] In some embodiments, expression of UGT74G1 Var_1 (SEQ ID NO:118), UGT74G1 Var_9 (SEQ ID NO:163), and/or UGT74G1 Var_11 (SEQ ID NO:167) results in increased steviol+5Glc (#24) accumulation by a recombinant host.

[0300] In some embodiments, expression of UGT74G1 Var_8 (SEQ ID NO:161), UGT74G1 Var_9 (SEQ ID NO:163), and/or UGT74G1 Var_10 (SEQ ID NO:165) results in increased steviol+5Glc (#25) accumulation by a recombinant host. In some embodiments, expression of UGT74G1 Var_2 (SEQ ID NO:120), UGT74G1 Var_4 (SEQ ID NO:124), UGT74G1 Var_6 (SEQ ID NO:128), UGT74G1 Var_7 (SEQ ID NO:130), UGT74G1 Var_8 (SEQ ID NO:161), UGT74G1 Var_9 (SEQ ID NO:163), UGT74G1 Var_10 (SEQ ID NO:165), and/or UGT74G1 Var_11 (SEQ ID NO:167) results in increased RebM accumulation by a recombinant host.

[0301] In some embodiments, expression of UGT74G1 Var_8 (SEQ ID NO:161), UGT74G1 Var_9 (SEQ ID NO:163), UGT74G1 Var_10 (SEQ ID NO:165), UGT74G1 Var_11 (SEQ ID NO:167), and/or UGT74G1 Var_12 (SEQ ID NO:169) results in increased steviol+6Glc (isomer 1) accumulation by a recombinant host.

[0302] In some embodiments, expression of UGT74G1 Var_7 (SEQ ID NO:130) and/or UGT74G1 Var_10 (SEQ ID NO:165) results in increased steviol+6Glc (#23) accumulation by a recombinant host. In some embodiments, expression of UGT74G1 Var_7 (SEQ ID NO:130), UGT74G1 Var_8 (SEQ ID NO:161), UGT74G1 Var_9 (SEQ ID NO:163), and/or UGT74G1 Var_11 (SEQ ID NO:167) results in increased steviol+7Glc (isomer 2) accumulation by a recombinant host.

[0303] In some embodiments, expression of UGT74G1 Var_1 (SEQ ID NO:118), UGT74G1 Var_2 (SEQ ID NO:120), UGT74G1 Var_5 (SEQ ID NO:126), UGT74G1 Var_7 (SEQ ID NO:130), and/or UGT74G1 Var_9 (SEQ ID NO:163) results in increased steviol+7Glc (isomer 5) accumulation by a recombinant host.

[0304] In some embodiments, expression of UGT74G1 Var_3 (SEQ ID NO:122), UGT74G1 Var_4 (SEQ ID NO:124), UT74G1 Var_7 (SEQ ID NO:130), UGT74G1 Var_8 (SEQ ID NO:161), UGT74G1 Var_9 (SEQ ID NO:163), and/or UGT74G1 Var_12 (SEQ ID NO:169) results in decreased ent-kaurenoic acid+2Glc (#7) accumulation by a recombinant host.

[0305] In some embodiments, expression of UGT74G1 Var_3 (SEQ ID NO:122), UGT74G1 Var_7 (SEQ ID NO:130), UGT74G1 Var_8 (SEQ ID NO:161), UGT74G1 Var_9 (SEQ ID NO:163), and/or UGT74G1 Var_12 (SEQ ID NO:169) results in decreased ent-kaurenoic acid+3Glc (isomer 1) accumulation by a recombinant host.

[0306] In some embodiments, expression of UGT74G1 Var_3 (SEQ ID NO:122), UGT74G1 Var_7 (SEQ ID NO:130), UGT74G1 Var_8 (SEQ ID NO:161), UGT74G1 Var_9 (SEQ ID NO:163), and/or UGT74G1 Var_12 (SEQ ID NO:169) results in decreased ent-kaurenoic acid+3Glc (isomer 2) accumulation by a recombinant host.

[0307] In some embodiments, expression of UGT74G1 Var_12 (SEQ ID NO:169) results in decreased 13-SMG accumulation by a recombinant host. In some embodiments, expression of UGT74G1 Var_3 (SEQ ID NO:122), UGT74G1 Var_7 (SEQ ID NO:130), UGT74G1 Var_8 (SEQ ID NO:161), UGT74G1 Var_9 (SEQ ID NO:163), and/or UGT74G1 Var_12 (SEQ ID NO:169) results in decreased 19-SMG accumulation by a recombinant host.

[0308] In some embodiments, expression of UGT74G1 Var_3 (SEQ ID NO:122), UGT74G1 Var_10 (SEQ ID NO:165), UGT74G1 Var_11 (SEQ ID NO:167), and/or UGT74G1 Var_12 (SEQ ID NO:169) results in decreased 1,2-stevioside accumulation by a recombinant host.

[0309] In some embodiments, expression of UGT74G1 Var_12 (SEQ ID NO:169) results in decreased 1,3-stevioside accumulation by a recombinant host. In some embodiments, expression of UGT74G1 Var_12 (SEQ ID NO:169) results in decreased steviol-1,2-bioside accumulation by a recombinant host.

[0310] In some embodiments, expression of UGT74G1 Var_12 (SEQ ID NO:169) results in decreased rubusoside accumulation by a recombinant host. In some embodiments, expression of UGT74G1 Var_3 (SEQ ID NO:122) and/or UGT74G1 Var_12 (SEQ ID NO:169) results in decreased RebA accumulation by a recombinant host.

[0311] In some embodiments, expression of UGT74G1 Var_12 (SEQ ID NO:169) results in decreased RebB accumulation by a recombinant host. In some embodiments, expression of UGT74G1 Var_3 (SEQ ID NO:122), UGT74G1 Var_8 (SEQ ID NO:161), and/or UGT74G1 Var_12 (SEQ ID NO:169) results in decreased steviol+4Glc (#26) accumulation by a recombinant host.

[0312] In some embodiments, expression of UGT74G1 Var_10 (SEQ ID NO:165) and/or UGT74G1 Var_12 (SEQ ID NO:169) results in decreased steviol+4Glc (#33) accumulation by a recombinant host.

[0313] In some embodiments, expression of UGT74G1 Var_3 (SEQ ID NO:122), UGT74G1 Var_10 (SEQ ID NO:165), and/or UGT74G1 Var_12 (SEQ ID NO:169) results in decreased RebD accumulation by a recombinant host.

[0314] In some embodiments, expression of UGT74G1 Var_3 (SEQ ID NO:122), UGT74G1 Var_7 (SEQ ID NO:130), UGT74G1 Var_8 (SEQ ID NO:161), and/or UGT74G1 Var_12 (SEQ ID NO:169) results in decreased steviol+5Glc (#24) accumulation by a recombinant host.

[0315] In some embodiments, expression of UGT74G1 Var_3 (SEQ ID NO:122), UGT74G1 Var_11 (SEQ ID NO:167), and/or UGT74G1 Var_12 (SEQ ID NO:169) results in decreased steviol+5Glc (#25) accumulation by a recombinant host.

[0316] In some embodiments, expression of UGT74G1 Var_1 (SEQ ID NO:118) and/or UGT74G1 Var_3 (SEQ ID NO:122) results in decreased steviol+6Glc (isomer 1) accumulation by a recombinant host.

[0317] In some embodiments, expression of UGT74G1 Var_3 (SEQ ID NO:122) and/or UGT74G1 Var_12 (SEQ ID NO:169) results in decreased RebM accumulation by a recombinant host.

[0318] In some embodiments, expression of UGT74G1 Var_3 (SEQ ID NO:122), UGT74G1 Var_10 (SEQ ID NO:165), and/or UGT74G1 Var_12 (SEQ ID NO:169) results in decreased steviol+7Glc (isomer 2) accumulation by a recombinant host.

[0319] In some embodiments, expression of UGT74G1 Var_3 (SEQ ID NO:122), UGT74G1 Var_4 (SEQ ID NO:124), UGT74G1 Var_7 (SEQ ID NO:130), UGT74G1 Var_11 (SEQ ID NO:167), and/or UGT74G1 Var_12 (SEQ ID NO:169) results in decreased steviol+7Glc (isomer 5) accumulation by a recombinant host.

[0320] In some embodiments, a bifunctional polypeptide is capable of glycosylating steviol or a steviol glycoside at its C-19 carboxyl group and glycosylating steviol or a steviol glycoside at its C-13 hydroxyl group. In some embodiments, a bifunctional polypeptide capable of glycosylating steviol or a steviol glycoside at its C-19 carboxyl group and glycosylating steviol or a steviol glycoside at its C-13 hydroxyl group comprises a polypeptide capable of glycosylating steviol or a steviol glycoside at its C-19 carboxyl group (e.g., a UGT74G1 polypeptide) and a polypeptide capable of glycosylating steviol or a steviol glycoside at its C-13 hydroxyl group (e.g., a UGT85C2 polypeptide) joined through a linker (i.e., a chimeric enzyme, or a fusion polypeptide). In some embodiments, the polypeptide capable of glycosylating steviol or a steviol glycoside at its C-19 carboxyl group is capable of glycosylating a steviol precursor, e.g., ent-kaurenoic acid at its C-19 carboxyl group and/or ent-kaurenol at its C-19 hydroxyl group.

[0321] In some embodiments, the C-terminal of a polypeptide capable of glycosylating steviol or a steviol glycoside at its C-19 carboxyl group is joined to the N-terminal of a polypeptide capable of glycosylating steviol or a steviol glycoside at its C-13 hydroxyl group through a linker to provide the bifunctional polypeptide. In some embodiments, the C-terminal of a polypeptide capable of glycosylating steviol or a steviol glycoside at its C-13 hydroxyl group is joined to the N-terminal of a polypeptide capable of glycosylating steviol or a steviol glycoside at its C-19 carboxyl group through a linker to provide the bifunctional polypeptide. In some embodiments, the linker may be the amino acid sequence “KLVK.” In some embodiments, the linker may the amino acid sequence “EGKSSGSGSESKST” (SEQ ID NO:151). In some embodiments, the linker is the amino acid sequence RASSTKLVK″ (SEQ ID NO:150). In some embodiments, the linker is the amino acid sequence “GGGGS.” In some embodiments, the linker is two repeats of the amino acid sequence “GGGGS” “GGGGSGGGGS”). In some embodiments, the linker is three repeats of the amino acid sequence “GGGGS.” In some embodiments, the linker is a direct bond (i.e., between the C-terminal of a first polypeptide and the N-terminal of a second polypeptide).

[0322] In some embodiments, polypeptides capable of glycosylating steviol or a steviol glycoside at its C-13 hydroxyl and at its C-19 carboxyl group in vitro, in a recombinant host (i.e., in vivo) or by whole cell bioconversion include bifunctional polypeptides comprising a functional homolog of UGT74G1 (SEQ ID NO:4) joined to a functional homolog of UGT85C2 (SEQ ID NO:7) through a linker (“b”), i.e., UGT74G1-b-UGT85C2 or UGT85C2-b-UGT74G1.

[0323] In some embodiments, bifunctional polypeptides capable of glycosylating steviol or a steviol glycoside at its C-19 carboxyl group and glycosylating steviol or a steviol glycoside at its C-13 hydroxyl group (e.g., UGT74G1-b-UGT85C2 or UGT85C2-b-UGT74G1) further comprise a tag, e.g., a tag having the amino acid sequence set forth in SEQ ID NO:152, SEQ ID NO:153, SEQ ID NO:154, or SEQ ID NO:155.

[0324] In some embodiments, polypeptides suitable for producing (i.e., capable of synthesizing) steviol glycosides and/or glycosides of steviol precursors, such as 13-SMG, steviol-1,2-bioside, rubusoside, RebB, RebA, RebE, RebD, RebM, 19-SMG, steviol-1,3-bioside, 1,2-stevioside, 1,3-stevioside, steviol+4GLc (#26 and/or #33), steviol+5Glc (#24 and/or #25), steviol +6Glc (isomer 1 and/or #23), steviol+7Glc (isomer 2 and/or isomer 5), ent-kaurenoic acid+2Glc (#7), ent-kaurenoic acid+3Glc (isomer 1 and/or isomer 2), and/or ent-kaurenol+3Glc (isomer 1 and/or isomer 2) in a recombinant host include UGT74G1-b-UT85C2 chimeric enzymes, such as Chim_2 (SEQ ID NO:134), Chim_3 (SEQ ID NO:136), Chim_7 (SEQ ID NO:144), Chim_8 (SEQ ID NO:146), or Chim_9 (SEQ ID NO:148).

[0325] In some embodiments, a recombinant host expressing Chim_2 (SEQ ID NO:134) accumulates ent-kaurenol+3Glc (isomer 1 and/or isomer 2) and/or 13-SMG in vivo and/or via whole cell bioconversion. In some embodiments, a recombinant host expressing Chim_3 (SEQ ID NO:136) accumulates 13-SMG, RebB, and/or steviol+4Glc (#33) in vivo and/or via whole cell bioconversion. In some embodiments, a recombinant host expressing Chim_7 (SEQ ID NO:144) accumulates ent-kaurenol+3Glc (isomer 1 and 2), 13-SMG, steviol-1,2-bioside, steviol-1,3-bioside, RebB, and/or steviol+4Glc (#33) in vivo and/or via whole cell bioconversion. In some embodiments, a recombinant host expressing Chim_8 (SEQ ID NO:146) accumulates 13-SMG, steviol-1,2-bioside, steviol-1,3-bioside, RebB, and/or steviol+4Glc (#33) in vivo and/or via whole cell bioconversion. In some embodiments, a recombinant host expressing Chim_9 (SEQ ID NO:148) accumulates ent-kaurenol+3Glc (isomer 1 and 2), 19-SMG, steviol-1,3-bioside, rubusoside, 1,2-stevioside, RebB, steviol+4Glc (#26), and/or steviol+5Glc (#24 and/or #25) in vivo and/or via whole cell bioconversion. See, Tables 8-10.

[0326] In some embodiments, polypeptides suitable for producing (i.e., capable of synthesizing) steviol glycosides and/or glycosides of steviol precursors, such as ent-kaurenol+3Glc (#33), 13-SMG, rubusoside, steviol-1,2-bioside, steviol-1,3-bioside, 1,2-stevioside, RebB, Reb A, RebE, steviol+4Glc (#33) RebD, RebM, steviol+6Glc (#23), and/or steviol+7Glc (isomer 2) in a recombinant host include UGT85C2-b-UT74G1 chimeric enzymes, such as Chim_1 (SEQ ID NO:132), Chim_4 (SEQ ID NO:138), Chim_5 (SEQ ID NO:140), or Chim_6 (SEQ ID NO:142).

[0327] In some embodiments, a recombinant host expressing Chim_1 (SEQ ID NO:132) accumulates ent-kaurenol+3Glc (isomer 1 and/or isomer 2), 13-SMG, rubusoside, and/or RebB in vivo and/or via whole cell bioconversion. In some embodiments, a recombinant host expressing Chim_4 (SEQ ID NO:138) accumulates 13-SMG, steviol-1,3-bioside, rubusoside, RebB, RebA, RebE, steviol+4Glc (#33), RebD, RebM, steviol+6Glc (#23), and/or steviol+7Glc (isomer 2) in vivo and/or via whole cell bioconversion. In some embodiments, a recombinant host expressing Chim_5 (SEQ ID NO:140) accumulates ent-kaurenol+3Glc (isomer 1 and/or isomer 2), 13-SMG, rubusoside, RebB, RebE, and/or steviol+4Glc (#33) in vivo and/or via whole cell bioconversion. In some embodiments, a recombinant host expressing Chim_6 (SEQ ID NO:142) accumulates ent-kaurenol+3Glc (isomer 1 and/or isomer 2), 13-SMG, steviol-1,3-bioside, rubusoside, and/or steviol+4Glc (#33) in vivo and/or via whole cell bioconversion. See, Tables 8-10.

[0328] In some embodiments, expression of a bifunctional polypeptide is capable of glycosylating steviol or a steviol glycoside at its C-19 carboxyl group and glycosylating steviol or a steviol glycoside at its C-13 hydroxyl group (e.g., a UGT74G1-b-UGT85C2 and/or UGT85C2-b-UGT74G1 chimeric enzyme) that increases ent-kaurenol+3Glc (isomer 1 and/or isomer 2) accumulation by a recombinant host results in increased accumulation of 13-SMG, steviol-1,2-bioside, steviol-1,3-bioside, rubusoside, 1,2-stevioside, RebB, RebA, RebE, steviol+4Glc (#26 and/or #33), steviol+5Glc (#24 and/or #25) but decreased accumulation of ent-kaurenoic acid+2Glc (#7), ent-kaurenoic acid+3Glc (isomer 1 and/or isomer 2), 19-SMG, RebA, steviol+4Glc (#26), RebD, steviol+5Glc (#24 and/or #25), steviol+6Glc (isomer 1), RebM, and/or steviol+7Glc (isomer 2 and/or isomer 5).

[0329] In some embodiments, expression of a bifunctional polypeptide is capable of glycosylating steviol or a steviol glycoside at its C-19 carboxyl group and glycosylating steviol or a steviol glycoside at its C-13 hydroxyl group (e.g., a UGT74G1-b-UGT85C2 and/or UGT85C2-b-UGT74G1 chimeric enzyme) that increases 13-SMG accumulation by a recombinant host results in increased accumulation of ent-kaurenol+3Glc (isomer 1 and/or isomer 2), steviol-1,2-bioside, steviol-1,3-bioside, rubusoside, 1,2-stevioside, RebB, RebE, steviol+4Glc (#33), RebD, steviol+5Glc (#24 and/or #25), RebM, steviol+6Glc (#23), and/or steviol+7Glc (isomer 2) but decreased accumulation of ent-kaurenoic acid+2Glc (#7), ent-kaurenoic acid+3Glc (isomer 1 and/or isomer 2), 19-SMG, 1,2-stevioside, RebA, steviol+4Glc (#26), RebD, steviol+5Glc (#24 and/or #25), steviol+6Glc (isomer 1), RebM, and/or steviol+7Glc (isomer 2 and/or isomer 5).

[0330] In some embodiments, expression of a bifunctional polypeptide is capable of glycosylating steviol or a steviol glycoside at its C-19 carboxyl group and glycosylating steviol or a steviol glycoside at its C-13 hydroxyl group (e.g., a UGT74G1-b-UGT85C2 and/or UGT85C2-b-UGT74G1 chimeric enzyme) that increases 19-SMG accumulation by a recombinant host results in increased accumulation of ent-kaurenol+3Glc (isomer 1 and/or isomer 2), steviol-1,3-bioside, rubusoside, 1,2-stevioside, RebB, steviol+4Glc (#26), and/or steviol+5Glc (#24 and/or #25) but decreased accumulation of ent-kaurenoic acid+2Glc (#7), ent-kaurenoic acid+3Glc (isomer 1), RebD, steviol+6Glc (isomer 1), RebM, and/or steviol+7Glc (isomer 2 and/or isomer 5).

[0331] In some embodiments, expression of a bifunctional polypeptide is capable of glycosylating steviol or a steviol glycoside at its C-19 carboxyl group and glycosylating steviol or a steviol glycoside at its C-13 hydroxyl group (e.g., a UGT74G1-b-UGT85C2 and/or UGT85C2-b-UGT74G1 chimeric enzyme) that increases steviol-1,2-bioside accumulation by a recombinant host results in increased accumulation of ent-kaurenol+3Glc (isomer 1 and/or isomer 2), 13-SMG, steviol-1,3-bioside, RebB, and/or steviol+4Glc (#33) but decreased accumulation of ent-kaurenoic acid+2Glc (#7), ent-kaurenoic acid+3Glc (isomer 1 and/or isomer 2), 19-SMG, 1,2-stevioside, RebA, RebD, steviol+5Glc (#24), steviol+6Glc (isomer 1), RebM, and/or steviol+7Glc (isomer 5).

[0332] In some embodiments, expression of a bifunctional polypeptide is capable of glycosylating steviol or a steviol glycoside at its C-19 carboxyl group and glycosylating steviol or a steviol glycoside at its C-13 hydroxyl group (e.g., a UGT74G1-b-UGT85C2 and/or UGT85C2-b-UGT74G1 chimeric enzyme) that increases steviol-1,3-bioside accumulation by a recombinant host results in increased accumulation of ent-kaurenol+3Glc (isomer 1 and/or isomer 2), 13-SMG, 19-SMG, steviol-1,2-bioside, rubusoside, 1,2-stevioside, RebB, RebA, RebE, steviol+4Glc (#26 and/or #33), RebD, steviol+5Glc (#24 and/or #25), RebM, steviol+6Glc (#23), and/or steviol+7Glc (isomer 2) but decreased accumulation of ent-kaurenoic acid+2Glc (#7), ent-kaurenoic acid+3Glc (isomer 1 and/or isomer 2), 19-SMG, 1,2-stevioside, RebA, RebD, steviol+5Glc (#24), steviol+6Glc (isomer 1), RebM, and/or steviol+7Glc (isomer 2 and/or isomer 5).

[0333] In some embodiments, expression of a bifunctional polypeptide is capable of glycosylating steviol or a steviol glycoside at its C-19 carboxyl group and glycosylating steviol or a steviol glycoside at its C-13 hydroxyl group (e.g., a UGT74G1-b-UGT85C2 and/or UGT85C2-b-UGT74G1 chimeric enzyme) that increases rubusoside accumulation by a recombinant host results in increased accumulation of ent-kaurenol+3Glc (isomer 1 and/or isomer 2), 13-SMG, 19-SMG, steviol-1,3-bioside, 1,2-stevioside, RebB, RebA, RebE, steviol+4Glc (#26 and/or #33), RebD, steviol+5Glc (#24 and/or #25), RebM, steviol+6Glc (#23), and/or steviol+7Glc (isomer 2) but decreased accumulation of ent-kaurenoic acid+2Glc (#7), ent-kaurenoic acid+3Glc (isomer 1 and/or isomer 2), 19-SMG, RebD, steviol+6Glc (isomer 1), RebM, and/or steviol+7Glc (isomer 2 and/or isomer 5).

[0334] In some embodiments, expression of a bifunctional polypeptide is capable of glycosylating steviol or a steviol glycoside at its C-19 carboxyl group and glycosylating steviol or a steviol glycoside at its C-13 hydroxyl group (e.g., a UGT74G1-b-UGT85C2 and/or UGT85C2-b-UGT74G1 chimeric enzyme) that increases 1,2-stevioside accumulation by a recombinant host results in increased accumulation of ent-kaurenol+3Glc (isomer 1 and/or isomer 2), 19-SMG, steviol-1,3-bioside, rubusoside, RebB, steviol+4Glc (#26), and/or steviol+5Glc (#24 and/or #25) but decreased accumulation of ent-kaurenoic acid+2Glc (#7), ent-kaurenoic acid+3Glc (isomer 1), RebD, steviol+6Glc (isomer 1), RebM, and/or steviol+7Glc (isomer 2 and/or isomer 5).

[0335] In some embodiments, expression of a bifunctional polypeptide is capable of glycosylating steviol or a steviol glycoside at its C-19 carboxyl group and glycosylating steviol or a steviol glycoside at its C-13 hydroxyl group (e.g., a UGT74G1-b-UGT85C2 and/or UGT85C2-b-UGT74G1 chimeric enzyme) that increases RebB accumulation by a recombinant host results in increased accumulation of ent-kaurenol+3Glc (isomer 1 and/or isomer 2), 13-SMG, 19-SMG, steviol-1,2-bioside, steviol-1,3-bioside, rubusoside, 1,2-stevioside, RebA, RebE, steviol+4Glc (#26 and/or #33), RebD, steviol+5Glc (#24 and/or #25), RebM, steviol+6Glc (#23), and/or steviol+7Glc (isomer 2) but decreased accumulation of ent-kaurenoic acid+2Glc (#7), ent-kaurenoic acid+3Glc (isomer 1 and/or isomer 2), 19-SMG, 1,2-stevioside, RebA, steviol+4Glc (#26), RebD, steviol+5Glc (#24 and/or #25), steviol+6Glc (isomer 1), RebM, and/or steviol+7Glc (isomer 2 and/or isomer 5).

[0336] In some embodiments, expression of a bifunctional polypeptide is capable of glycosylating steviol or a steviol glycoside at its C-19 carboxyl group and glycosylating steviol or a steviol glycoside at its C-13 hydroxyl group (e.g., a UGT74G1-b-UGT85C2 and/or UGT85C2-b-UGT74G1 chimeric enzyme) that increases RebA accumulation by a recombinant host results in increased accumulation of 13-SMG, steviol-1,3-bioside, rubusoside, RebB, RebE, steviol+4Glc (#33), RebD, RebM, steviol+6Glc (#23), and/or steviol+7Glc (isomer 2) but decreased accumulation of ent-kaurenoic acid+2Glc (#7), ent-kaurenoic acid+3Glc (isomer 1 and/or isomer 2), 19-SMG, and/or steviol+7Glc (isomer 5).

[0337] In some embodiments, expression of a bifunctional polypeptide is capable of glycosylating steviol or a steviol glycoside at its C-19 carboxyl group and glycosylating steviol or a steviol glycoside at its C-13 hydroxyl group (e.g., a UGT74G1-b-UGT85C2 and/or UGT85C2-b-UGT74G1 chimeric enzyme) that increases RebE accumulation by a recombinant host results in increased accumulation of ent-kaurenol+3Glc (isomer 1 and/or isomer 2), 13-SMG, steviol-1,3-bioside, rubusoside, RebB, RebA, steviol+4Glc (#33), RebD, RebM, steviol+6Glc (#23), and/or steviol+7Glc (isomer 2) but decreased accumulation of ent-kaurenoic acid+2Glc (#7), ent-kaurenoic acid+3Glc (isomer 1 and/or isomer 2), 19-SMG, and/or steviol+7Glc (isomer 5).

[0338] In some embodiments, expression of a bifunctional polypeptide is capable of glycosylating steviol or a steviol glycoside at its C-19 carboxyl group and glycosylating steviol or a steviol glycoside at its C-13 hydroxyl group (e.g., a UGT74G1-b-UGT85C2 and/or UGT85C2-b-UGT74G1 chimeric enzyme) that increases steviol+4Glc (#26) accumulation by a recombinant host results in increased accumulation of ent-kaurenol+3Glc (isomer 1 and/or isomer 2), 19-SMG, steviol-1,3-bioside, rubusoside, 1,2-stevioside, RebB, and/or steviol+5Glc (#24 and/or #25) but decreased accumulation of ent-kaurenoic acid+2Glc (#7), ent-kaurenoic acid+3Glc (isomer 1), RebD, steviol+6Glc (isomer 1), RebM, and/or steviol+7Glc (isomer 2 and/or isomer 5).

[0339] In some embodiments, expression of a bifunctional polypeptide is capable of glycosylating steviol or a steviol glycoside at its C-19 carboxyl group and glycosylating steviol or a steviol glycoside at its C-13 hydroxyl group (e.g., a UGT74G1-b-UGT85C2 and/or UGT85C2-b-UGT74G1 chimeric enzyme) that increases steviol+4Glc (#33) accumulation by a recombinant host results in increased accumulation of ent-kaurenol+3Glc (isomer 1 and/or isomer 2), 13-SMG, steviol-1,2-bioside, steviol-1,3-bioside, rubusoside, RebB, RebA, RebE, RebD, RebM, steviol+6Glc (#23), and/or steviol+7Glc (isomer 2) but decreased accumulation of kaurenoic acid+2Glc (#7), kaurenoic acid+3Glc (isomer 1 and/or isomer 2), 19-SMG, 1,2-stevioside, RebA, steviol+4Glc (#26), RebD, steviol+5Glc (#24 and/or #25), steviol+6Glc (isomer 1), RebM, and/or steviol+7Glc (isomer 2 and/or isomer 5).

[0340] In some embodiments, expression of a bifunctional polypeptide is capable of glycosylating steviol or a steviol glycoside at its C-19 carboxyl group and glycosylating steviol or a steviol glycoside at its C-13 hydroxyl group (e.g., a UGT74G1-b-UGT85C2 and/or UGT85C2-b-UGT74G1 chimeric enzyme) that increases RebD accumulation by a recombinant host results in increased accumulation of 13-SMG, steviol-1,3-bioside, rubusoside, RebB, RebA, RebE, steviol+4Glc (#33), RebM, steviol+6Glc (#23), and/or steviol+7Glc (isomer 2) but decreased accumulation of ent-kaurenoic acid+2Glc (#7), ent-kaurenoic acid+3Glc (isomer 1 and/or isomer 2), 19-SMG, and/or steviol+7Glc (isomer 5).

[0341] In some embodiments, expression of a bifunctional polypeptide is capable of glycosylating steviol or a steviol glycoside at its C-19 carboxyl group and glycosylating steviol or a steviol glycoside at its C-13 hydroxyl group (e.g., a UGT74G1-b-UGT85C2 and/or UGT85C2-b-UGT74G1 chimeric enzyme) that increases steviol+4Glc (#24 and/or #25) accumulation by a recombinant host results in increased accumulation of ent-kaurenol+3Glc (isomer 1 and/or isomer 2), 19-SMG, steviol-1,3-bioside, rubusoside, 1,2-stevioside, RebB, and/or steviol+5Glc (#26) but decreased accumulation of ent-kaurenoic acid+2Glc (#7), ent-kaurenoic acid+3Glc (isomer 1), RebD, steviol+6Glc (isomer 1), RebM, and/or steviol+7Glc (isomer 2 and/or isomer 5).

[0342] In some embodiments, expression of a bifunctional polypeptide is capable of glycosylating steviol or a steviol glycoside at its C-19 carboxyl group and glycosylating steviol or a steviol glycoside at its C-13 hydroxyl group (e.g., a UGT74G1-b-UGT85C2 and/or UGT85C2-b-UGT74G1 chimeric enzyme) that increases RebM accumulation by a recombinant host results in increased accumulation of 13-SMG, steviol-1,3-bioside, rubusoside, RebB, RebA, RebE, steviol+4Glc (#33), RebD, steviol+6Glc (#23), and/or steviol+7Glc (isomer 2) but decreased accumulation of ent-kaurenoic acid+2Glc (#7), ent-kaurenoic acid+3Glc (isomer 1 and/or isomer 2), 19-SMG, and/or steviol+7Glc (isomer 5).

[0343] In some embodiments, expression of a bifunctional polypeptide is capable of glycosylating steviol or a steviol glycoside at its C-19 carboxyl group and glycosylating steviol or a steviol glycoside at its C-13 hydroxyl group (e.g., a UGT74G1-b-UGT85C2 and/or UGT85C2-b-UGT74G1 chimeric enzyme) that increases steviol+6Glc (#23) accumulation by a recombinant host results in increased accumulation of 13-SMG, steviol-1,3-bioside, rubusoside, RebB, RebA, RebE, steviol+4Glc (#33), RebD, RebM, and/or steviol+7Glc (isomer 2) but decreased accumulation of ent-kaurenoic acid+2Glc (#7), ent-kaurenoic acid+3Glc (isomer 1 and/or isomer 2), 19-SMG, and/or steviol+7Glc (isomer 5).

[0344] In some embodiments, expression of a bifunctional polypeptide is capable of glycosylating steviol or a steviol glycoside at its C-19 carboxyl group and glycosylating steviol or a steviol glycoside at its C-13 hydroxyl group (e.g., a UGT74G1-b-UGT85C2 and/or UGT85C2-b-UGT74G1 chimeric enzyme) that increases steviol+7Glc (isomer 2) accumulation by a recombinant host results in increased accumulation of 13-SMG, steviol-1,3-bioside, rubusoside, RebB, RebA, RebE, steviol+4Glc (#33), RebD, RebM, and/or steviol+6Glc (#23) but decreased accumulation of ent-kaurenoic acid+2Glc (#7), ent-kaurenoic acid+3Glc (isomer 1 and/or isomer 2), 19-SMG, steviol+7Glc (isomer 5).

[0345] In some embodiments, expression of Chim_1 (SEQ ID NO:132), Chim_2 (SEQ ID NO:134), Chim_5 (SEQ ID NO:140), Chim_6 (SEQ ID NO:142), Chim_7 (SEQ ID NO:144), and/or Chim_9 (SEQ ID NO:148) results in increased ent-kaurenol+3Glc (isomer 1 and/or isomer 2) accumulation by a recombinant host. In some embodiments, expression of Chim_1 (SEQ ID NO:132), Chim_2 (SEQ ID NO:134), Chim_3 (SEQ ID NO:136), Chim_4 (SEQ ID NO:138), Chim_5 (SEQ ID NO:140), Chim_6 (SEQ ID NO:142), Chim_7 (SEQ ID NO:144), and/or Chim_8 (SEQ ID NO:146) results in increased 13-SMG accumulation by a recombinant host. In some embodiments, expression of Chim_9 (SEQ ID NO:148) results in increased 19-SMG accumulation by a recombinant host. In some embodiments, expression of Chim_7 (SEQ ID NO:144) and/or Chim_8 (SEQ ID NO:146) results in increased steviol-1,2-bioside accumulation by a recombinant host. In some embodiments, expression of Chim_4 (SEQ ID NO:138), Chim_6 (SEQ ID NO:142), Chim_7 (SEQ ID NO:144), Chim_8 (SEQ ID NO:146), and/or Chim_9 (SEQ ID NO:148) results in increased steviol-1,3-bioside accumulation by a recombinant host. In some embodiments, expression of Chim_1 (SEQ ID NO:132), Chim_4 (SEQ ID NO:138), Chim_5 (SEQ ID NO:140), Chim_6 (SEQ ID NO:142), and/or Chim_9 (SEQ ID NO:148) results in increased rubusoside accumulation by a recombinant host. In some embodiments, expression of Chim_9 (SEQ ID NO:148) results in increased 1,2-stevioside accumulation by a recombinant host. In some embodiments, expression of Chim_1 (SEQ ID NO:132), Chim_3 (SEQ ID NO:136), Chim_4 (SEQ ID NO:138), Chim_5 (SEQ ID NO:140), Chim_7 (SEQ ID NO:144), Chim_8 (SEQ ID NO:146), and/or Chim_9 (SEQ ID NO:148) results in increased RebB accumulation by a recombinant host. In some embodiments, expression of Chim_4 (SEQ ID NO:138) results in increased RebA accumulation by a recombinant host. In some embodiments, expression of Chim_4 (SEQ ID NO:138) and/or Chim_5 (SEQ ID NO:140) results in increased RebE accumulation by a recombinant host. In some embodiments, expression of Chim_9 (SEQ ID NO:148) results in increased steviol+4Glc (#26) accumulation by a recombinant host. In some embodiments, expression of Chim_1 (SEQ ID NO:132), Chim_3 (SEQ ID NO:136), Chim_4 (SEQ ID NO:138), Chim_5 (SEQ ID NO:140), Chim_6 (SEQ ID NO:142), Chim_7 (SEQ ID NO:144), and/or Chim_8 (SEQ ID NO:146) results in increased RebB accumulation by a recombinant host. In some embodiments, expression of Chim_4 (SEQ ID NO:138) results in increased RebD accumulation by a recombinant host. In some embodiments, expression of Chim_9 (SEQ ID NO:148) results in increased steviol+5Glc (#24) accumulation by a recombinant host. In some embodiments, expression of Chim_9 (SEQ ID NO:148) results in increased steviol+5Glc (#25) accumulation by a recombinant host. In some embodiments, expression of Chim_4 (SEQ ID NO:138) results in increased RebM accumulation by a recombinant host. In some embodiments, expression of Chim_4 (SEQ ID NO:138) results in increased steviol+6Glc (#23) accumulation by a recombinant host. In some embodiments, expression of Chim_4 (SEQ ID NO:138) results in increased steviol+7Glc (isomer 2) accumulation by a recombinant host.

[0346] In some embodiments, expression of Chim_1 (SEQ ID NO:132), Chim_2 (SEQ ID NO:134), Chim_3 (SEQ ID NO:136), Chim_4 (SEQ ID NO:138), Chim_5 (SEQ ID NO:140), Chim_6 (SEQ ID NO:142), Chim_7 (SEQ ID NO:144), Chim_8 (SEQ ID NO:146), and/or Chim_9 (SEQ ID NO:148) results in decreased ent-kaurenoic acid+2Glc (#7) accumulation by a recombinant host. In some embodiments, expression of Chim_1 (SEQ ID NO:132), Chim_2 (SEQ ID NO:134), Chim_3 (SEQ ID NO:136), Chim_4 (SEQ ID NO:138), Chim_5 (SEQ ID NO:140), Chim_6 (SEQ ID NO:142), Chim_7 (SEQ ID NO:144), Chim_8 (SEQ ID NO:146), and/or Chim_9 (SEQ ID NO:148) results in decreased ent-kaurenoic acid+3Glc (isomer 1) accumulation by a recombinant host. In some embodiments, expression of Chim_1 (SEQ ID NO:132), Chim_2 (SEQ ID NO:134), Chim_3 (SEQ ID NO:136), Chim_4 (SEQ ID NO:138), Chim_5 (SEQ ID NO:140), Chim_6 (SEQ ID NO:142), Chim_7 (SEQ ID NO:144), and/or Chim_8 (SEQ ID NO:146) results in decreased ent-kaurenoic acid+3Glc (isomer 2) accumulation by a recombinant host. In some embodiments, expression of Chim_1 (SEQ ID NO:132), Chim_2 (SEQ ID NO:134), Chim_3 (SEQ ID NO:136, Chim_4 (SEQ ID NO:138), Chim_5 (SEQ ID NO:140), Chim_6 (SEQ ID NO:142), Chim_7 (SEQ ID NO:144), and/or Chim_8 (SEQ ID NO:146) results in decreased 19-SMG accumulation by a recombinant host. In some embodiments, expression of Chim_3 (SEQ ID NO:136) and/or Chim_8 (SEQ ID NO:146) results in decreased 1,2-stevioside accumulation by a recombinant host. In some embodiments, expression of Chim_2 (SEQ ID NO:134), Chim_3 (SEQ ID NO:136), Chim_7 (SEQ ID NO:144), and/or Chim_8 (SEQ ID NO:146) results in decreased RebA accumulation by a recombinant host. In some embodiments, expression of Chim_2 (SEQ ID NO:134) and/or Chim_3 (SEQ ID NO:136) results in decreased steviol+4Glc (#26) accumulation by a recombinant host. In some embodiments, expression of Chim_2 (SEQ ID NO:134), Chim_3 (SEQ ID NO:136), Chim_7 (SEQ ID NO:144), Chim_8 (SEQ ID NO:146), and/or Chim_9 (SEQ ID NO:148) results in decreased RebD accumulation by a recombinant host. In some embodiments, expression of Chim_5 (SEQ ID NO:132), Chim_2 (SEQ ID NO:134), Chim_3 (SEQ ID NO:136), Chim_7 (SEQ ID NO:144), and/or Chim_8 (SEQ ID NO:146) results in decreased steviol+5Glc (#24) accumulation by a recombinant host. In some embodiments, expression of Chim_2 (SEQ ID NO:134) and/or Chim_3 (SEQ ID NO:136) results in decreased steviol+5Glc (#25) accumulation by a recombinant host. In some embodiments, expression of Chim_3 (SEQ ID NO:136), Chim_7 (SEQ ID NO:144), Chim_8 (SEQ ID NO:146), and/or Chim_9 (SEQ ID NO:148) results in decreased steviol+6Glc (isomer 1) accumulation by a recombinant host. In some embodiments, expression of Chim_2 (SEQ ID NO:134), Chim_3 (SEQ ID NO:136), Chim_7 (SEQ ID NO:144), and/or Chim_9 (SEQ ID NO:148) results in decreased RebM accumulation by a recombinant host. In some embodiments, expression of Chim_3 (SEQ ID NO:136) and/or Chim_9 (SEQ ID NO:148) results in decreased steviol+7Glc (isomer 2) accumulation by a recombinant host. In some embodiments, expression of Chim_1 (SEQ ID NO:132), Chim_2 (SEQ ID NO:134), Chim_3 (SEQ ID NO:136), Chim_4 (SEQ ID NO:138), Chim_5 (SEQ ID NO:140), Chim_6 (SEQ ID NO:142), Chim_7 (SEQ ID NO:144), Chim_8 (SEQ ID NO:146), and/or Chim_9 (SEQ ID NO:148) results in decreased steviol+7Glc (isomer 5) accumulation by a recombinant host.

[0347] In some embodiments, polypeptides capable of glycosylating steviol or a steviol glycoside at its C-19 carboxyl group in vitro, in a recombinant host (i.e., in vivo) or by whole cell bioconversion include polypeptides comprising a functional homolog of UGT74G1 (SEQ ID NO:4) and a tag (e.g., a tag having the amino acid sequence set forth in SEQ ID NO:152, SEQ ID NO:153, SEQ ID NO:154, or SEQ ID NO:155), joined through a linker (i.e., a chimeric enzyme, or a fusion polypeptide; i.e., a tagged polypeptide). In some embodiments, the tagged polypeptide capable of glycosylating steviol or a steviol glycoside at its C-19 carboxyl group is capable of glycosylating a steviol precursor, e.g., ent-kaurenoic acid at its C-19 carboxyl group and/or ent-kaurenol at its C-19 hydroxyl group. In some embodiments, the N-terminal of a polypeptide capable of glycosylating steviol or a steviol glycoside at its C-19 carboxyl group is joined to the C-terminal of a tag through a linker to provide the tagged polypeptide. In some embodiments, the linker may the amino acid sequence “EGKSSGSGSESKST” (SEQ ID NO:151). In some embodiments, the linker may be the amino acid sequence “KLVK.” In some embodiments, the linker is the amino acid sequence “RASSTKLVK” (SEQ ID NO:150). In some embodiments, the linker is the amino acid sequence “GGGGS.” In some embodiments, the linker is two repeats of the amino acid sequence “GGGGS” “GGGGSGGGGS”). In some embodiments, the linker is three repeats of the amino acid sequence “GGGGS.” In some embodiments, the linker is a direct bond (i.e., between the C-terminal of a first polypeptide and the N-terminal of a tag).

[0348] In some embodiments, tagged polypeptides capable of glycosylating steviol or a steviol glycoside at its C-19 carboxyl group in vitro, in a recombinant host (i.e., in vivo) or by whole cell bioconversion include polypeptides comprising a functional homolog of UGT74G1 (SEQ ID NO:4) joined to a tag (e.g., a tag having the amino acid sequence set forth in SEQ ID NO:152, SEQ ID NO:153, SEQ ID NO:154, or SEQ ID NO:155) through a linker (e.g., a linker having the amino acid sequence set forth in SEQ ID NO:151).

[0349] In some embodiments, polypeptides suitable for producing (i.e., capable of synthesizing) steviol glycosides and/or glycosides of steviol precursors, such as 13-SMG, steviol-1,2-bioside, steviol-1,3-bioside, 1,2-stevioside, RebB, RebA, RebD, RebM, steviol+5Glc (#24 and/or #25), steviol+6Glc (isomer 1 and/or #23), and/or steviol+7Glc (isomer 2 and/or isomer 5) include tagged polypeptides, such as Chim_10 (SEQ ID NO:174), Chim_11 (SEQ ID NO:176), Chim_12 (SEQ ID NO:178), or Chim_13 (SEQ ID NO:180).

[0350] In some embodiments, a recombinant host expressing Chim_10 (SEQ ID NO:174) accumulates 13-SMG, RebD, RebM, steviol+5Glc (#24 and/or #25), steviol+6Glc (isomer 1 and/or #23), and/or steviol+7Glc (isomer 2 and/or isomer 5) in vivo and/or via whole cell bioconversion. In some embodiments, a recombinant host expressing Chim_11 (SEQ ID NO:176) accumulates 13-SMG, RebA, RebD, RebM, 1,2-stevioside, steviol+5Glc (#25), steviol+6Glc (isomer 1 and/or #23), and/or steviol+7Glc (isomer 2) in vivo and/or via whole cell bioconversion. In some embodiments, a recombinant host expressing Chim_12 (SEQ ID NO:178) accumulates 13-SMG, RebA, RebD, RebM, 1,2-stevioside, steviol+5Glc (#24 and #25), steviol+6Glc (isomer 1 and/or #23), and/or steviol+7Glc (isomer 2) in vivo and/or via whole cell bioconversion. In some embodiments, a recombinant host expressing Chim_13 (SEQ ID NO:180) accumulates 13-SMG, steviol-1,2-bioside, RebB, RebA, RebD, RebM, steviol-1,3-bioside, 1,2-stevioside, steviol+5Glc (#25), steviol+6Glc (isomer 1 and/or #23), and/or steviol+7Glc (isomer 2) in vivo and/or via whole cell bioconversion.

[0351] In some embodiments, expression of a tagged polypeptide capable of glycosylating steviol or a steviol glycoside at its C-19 carboxyl group (e.g., a tagged UGT74G1 polypeptide) that increases 13-SMG accumulation by a recombinant host results in increased accumulation of steviol-1,2-bioside, RebB, RebA, RebD, RebM, steviol-1,3-bioside, 1,2-stevioside, steviol+5Glc (#24 and/or #25), steviol+6Glc (isomer 1 and/or #23), and/or steviol+7Glc (isomer 2 and/or isomer 5), but decreased accumulation of ent-kaurenoic acid+2Glc (#7), ent-kaurenoic acid+3Glc (isomer 1 and/or isomer 2), 19-SMG, steviol-1,2-bioside, rubusoside, RebB, RebA, RebE, steviol-1,3-bioside, 1,2-stevioside, 1,3-stevioside, steviol+4Glc (#26 and/or #33), steviol+5Glc (#24), and/or steviol+7Glc (isomer 5).

[0352] In some embodiments, expression of a tagged polypeptide capable of glycosylating steviol or a steviol glycoside at its C-19 carboxyl group (e.g., a tagged UGT74G1 polypeptide) that increases steviol-1,2-bioside accumulation by a recombinant host results in increased accumulation of 13-SMG, RebB, RebA, RebD, RebM, steviol-1,3-bioside, 1,2-stevioside, steviol+5Glc (#25), steviol+6Glc (isomer 1 and/or #23), and/or steviol+7Glc (isomer 2) but decreased accumulation of of ent-kaurenoic acid+2Glc (#7), ent-kaurenoic acid+3Glc (isomer 1 and/or isomer 2), 19-SMG, rubusoside, RebE, 1,3-stevioside, steviol+4Glc (#26 and/or #33), steviol+5Glc (#24), and/or steviol+7Glc (isomer 5).

[0353] In some embodiments, expression of a tagged polypeptide capable of glycosylating steviol or a steviol glycoside at its C-19 carboxyl group (e.g., a tagged UGT74G1 polypeptide) that increases RebB accumulation by a recombinant host results in increased accumulation of 13-SMG, RebA, RebD, RebM, steviol-1,2-bioside, steviol-1,3-bioside, 1,2-stevioside, steviol+5Glc (#25), steviol+6Glc (isomer 1 and/or #23), and/or steviol+7Glc (isomer 2) but decreased accumulation of ent-kaurenoic acid+2Glc (#7), ent-kaurenoic acid+3Glc (isomer 1 and/or isomer 2), 19-SMG, rubusoside, RebE, 1,3-stevioside, steviol+4Glc (#26 and/or #33), steviol+5Glc (#24), and/or steviol+7Glc (isomer 5).

[0354] In some embodiments, expression of a tagged polypeptide capable of glycosylating steviol or a steviol glycoside at its C-19 carboxyl group (e.g., a tagged UGT74G1 polypeptide) that increases RebA accumulation by a recombinant host results in increased accumulation of 13-SMG, steviol-1,2-bioside, RebB, RebD, RebM, steviol-1,3-bioside, 1,2-stevioside, steviol+5Glc (#24 and/or #25), steviol+6Glc (isomer 1 and/or #23), and/or steviol+7Glc (isomer 2), but decreased accumulation of ent-kaurenoic acid+2Glc (#7), ent-kaurenoic acid+3Glc (isomer 1 and/or isomer 2), 19-SMG, steviol-1,2-bioside, rubusoside, RebB, RebE, steviol-1,3-bioside, 1,3-stevioside, steviol+4Glc (#26 and/or #33), steviol+5Glc (#24), and/or steviol+7Glc (isomer 5).

[0355] In some embodiments, expression of a tagged polypeptide capable of glycosylating steviol or a steviol glycoside at its C-19 carboxyl group (e.g., a tagged UGT74G1 polypeptide) that increases RebD accumulation by a recombinant host results in increased accumulation of 13-SMG, steviol-1,2-bioside, RebB, RebA, RebM, steviol-1,3-bioside, 1,2-stevioside, steviol+5Glc (#24 and/or #25), steviol+6Glc (isomer 1 and/or #23), and/or steviol+7Glc (isomer 2 and/or isomer 5), but decreased accumulation of ent-kaurenoic acid+2Glc (#7), ent-kaurenoic acid+3Glc (isomer 1 and/or isomer 2), 19-SMG, steviol-1,2-bioside, rubusoside, RebB, RebA, RebE, steviol-1,3-bioside, 1,2-stevioside, 1,3-stevioside, steviol+4Glc (#26 and/or #33), steviol+5Glc (#24), and/or steviol+7Glc (isomer 5).

[0356] In some embodiments, expression of a tagged polypeptide capable of glycosylating steviol or a steviol glycoside at its C-19 carboxyl group (e.g., a tagged UGT74G1 polypeptide) that increases RebM accumulation by a recombinant host results in increased accumulation of 13-SMG, steviol-1,2-bioside, RebB, RebA, RebD, steviol-1,3-bioside, 1,2-stevioside, steviol+5Glc (#24 and/or #25), steviol+6Glc (isomer 1 and/or #23), and/or steviol+7Glc (isomer 2 and/or isomer 5), but decreased accumulation of ent-kaurenoic acid+2Glc (#7), ent-kaurenoic acid+3Glc (isomer 1 and/or isomer 2), 19-SMG, steviol-1,2-bioside, rubusoside, RebB, RebA, RebE, steviol-1,3-bioside, 1,2-stevioside, 1,3-stevioside, steviol+4Glc (#26 and/or #33), steviol+5Glc (#24), and/or steviol+7Glc (isomer 5).

[0357] In some embodiments, expression of a tagged polypeptide capable of glycosylating steviol or a steviol glycoside at its C-19 carboxyl group (e.g., a tagged UGT74G1 polypeptide) that increases steviol-1,3-bioside accumulation by a recombinant host results in increased accumulation of 13-SMG, RebB, RebA, RebD, RebM, steviol-1,2-bioside, 1,2-stevioside, steviol+5Glc (#25), steviol+6Glc (isomer 1 and/or #23), and/or steviol+7Glc (isomer 2) but decreased accumulation of of ent-kaurenoic acid+2Glc (#7), ent-kaurenoic acid+3Glc (isomer 1 and/or isomer 2), 19-SMG, rubusoside, RebE, 1,3-stevioside, steviol+4Glc (#26 and/or #33), steviol+5Glc (#24), and/or steviol+7Glc (isomer 5).

[0358] In some embodiments, expression of a tagged polypeptide capable of glycosylating steviol or a steviol glycoside at its C-19 carboxyl group (e.g., a tagged UGT74G1 polypeptide) that increases 1,2-stevioside accumulation by a recombinant host results in increased accumulation of 13-SMG, steviol-1,2-bioside, RebA, RebB, RebD, RebM, steviol-1,3-bioside, steviol+5Glc (#24 and/or #25), steviol+6Glc (isomer 1 and/or #23), and/or steviol+7Glc (isomer 2), but decreased accumulation of ent-kaurenoic acid+2Glc (#7), ent-kaurenoic acid+3Glc (isomer 1 and/or isomer 2), 19-SMG, steviol-1,2-bioside, rubusoside, RebB, RebE, steviol-1,3-bioside, 1,3-stevioside, steviol+4Glc (#26 and/or #33), steviol+5Glc (#24), and/or steviol+7Glc (isomer 5).

[0359] In some embodiments, expression of a tagged polypeptide capable of glycosylating steviol or a steviol glycoside at its C-19 carboxyl group (e.g., a tagged UGT74G1 polypeptide) that increases steviol+5Glc (#24) accumulation by a recombinant host results in increased accumulation of 13-SMG, RebA, RebD, RebM, 1,2-stevioside, steviol+5Glc (#25), steviol+6Glc (isomer 1 and/or #23), and/or steviol+7Glc (isomer 2 and/or isomer 5), but decreased accumulation of ent-kaurenoic acid+2Glc (#7), ent-kaurenoic acid+3Glc (isomer 1 and/or isomer 2), 19-SMG, steviol-1,2-bioside, rubusoside, RebB, RebA, RebE, steviol-1,3-bioside, 1,2-stevioside, 1,3-stevioside, steviol+4Glc (#26 and/or #33), and/or steviol+7Glc (isomer 5).

[0360] In some embodiments, expression of a tagged polypeptide capable of glycosylating steviol or a steviol glycoside at its C-19 carboxyl group (e.g., a tagged UGT74G1 polypeptide) that increases steviol+5Glc (#25) accumulation by a recombinant host results in increased accumulation of 13-SMG, steviol-1,2-bioside, RebB, RebA, RebD, RebM, steviol-1,3-bioside, 1,2-stevioside, steviol+5Glc (#24), steviol+6Glc (isomer 1 and/or #23), and/or steviol+7Glc (isomer 2 and/or isomer 5), but decreased accumulation of ent-kaurenoic acid+2Glc (#7), ent-kaurenoic acid+3Glc (isomer 1 and/or isomer 2), 19-SMG, steviol-1,2-bioside, rubusoside, RebB, RebA, RebE, steviol-1,3-bioside, 1,2-stevioside, 1,3-stevioside, steviol+4Glc (#26 and/or #33), steviol+5Glc (#24), and/or steviol+7Glc (isomer 5).

[0361] In some embodiments, expression of a tagged polypeptide capable of glycosylating steviol or a steviol glycoside at its C-19 carboxyl group (e.g., a tagged UGT74G1 polypeptide) that increases steviol+6Glc (isomer 1) accumulation by a recombinant host results in increased accumulation of 13-SMG, steviol-1,2-bioside, RebB, RebA, RebD, RebM steviol-1,3-bioside, 1,2-stevioside, steviol+5Glc (#24 and/or #25), steviol+6Glc (#23), and/or steviol+7Glc (isomer 2 and/or isomer 5), but decreased accumulation of ent-kaurenoic acid+2Glc (#7), ent-kaurenoic acid+3Glc (isomer 1 and/or isomer 2), 19-SMG, steviol-1,2-bioside, rubusoside, RebB, RebA, RebE, steviol-1,3-bioside, 1,2-stevioside, 1,3-stevioside, steviol+4Glc (#26 and/or #33), steviol+5Glc (#24), and/or steviol+7Glc (isomer 5).

[0362] In some embodiments, expression of a tagged polypeptide capable of glycosylating steviol or a steviol glycoside at its C-19 carboxyl group (e.g., a tagged UGT74G1 polypeptide) that increases steviol+6Glc (#23) accumulation by a recombinant host results in increased accumulation of 13-SMG, steviol-1,2-bioside, RebB, RebA, RebD, RebM steviol-1,3-bioside, 1,2-stevioside, steviol+5Glc (#24 and/or #25), steviol+6Glc (isomer 1), and/or steviol+7Glc (isomer 2 and/or isomer 5), but decreased accumulation of ent-kaurenoic acid+2Glc (#7), ent-kaurenoic acid+3Glc (isomer 1 and/or isomer 2), 19-SMG, steviol-1,2-bioside, rubusoside, RebB, RebA, RebE, steviol-1,3-bioside, 1,2-stevioside, 1,3-stevioside, steviol+4Glc (#26 and/or #33), steviol+5Glc (#24), and/or steviol+7Glc (isomer 5).

[0363] In some embodiments, expression of a tagged polypeptide capable of glycosylating steviol or a steviol glycoside at its C-19 carboxyl group (e.g., a tagged UGT74G1 polypeptide) that increases steviol+7Glc (isomer 2) accumulation by a recombinant host results in increased accumulation of 13-SMG, steviol-1,2-bioside, RebB, RebA, RebD, RebM, steviol-1,3-bioside, 1,2-stevioside, steviol+5Glc (#24 and/or #25), steviol+6Glc (isomer 1 and/or #23), and/or steviol+7Glc (isomer 5), but decreased accumulation of ent-kaurenoic acid+2Glc (#7), ent-kaurenoic acid+3Glc (isomer 1 and/or isomer 2), 19-SMG, steviol-1,2-bioside, rubusoside, RebB, RebA, RebE, steviol-1,3-bioside, 1,2-stevioside, 1,3-stevioside, steviol+4Glc (#26 and/or #33), steviol+5Glc (#24), and/or steviol+7Glc (isomer 5).

[0364] In some embodiments, expression of a tagged polypeptide capable of glycosylating steviol or a steviol glycoside at its C-19 carboxyl group (e.g., a tagged UGT74G1 polypeptide) that increases steviol+7Glc (isomer 5) accumulation by a recombinant host results in increased accumulation of 13-SMG, RebD, RebM, steviol+5Glc (#24 and/or #25), steviol+6Glc (isomer 1 and/or #23), and/or steviol+7Glc (isomer 2), but decreased accumulation of ent-kaurenoic acid+2Glc (#7), ent-kaurenoic acid+3Glc (isomer 1 and/or isomer 2), 19-SMG, steviol-1,2-bioside, rubusoside, RebB, RebA, steviol-1,3-bioside, 1,2-stevioside, 1,3-stevioside, and/or steviol+4Glc (#26 and/or #33).

[0365] In some embodiments, expression of Chim_10 (SEQ ID NO:174), Chim_11 (SEQ ID NO:176), Chim_12 (SEQ ID NO:178), and/or Chim_13 (SEQ ID NO:180) results in increased 13-SMG accumulation by a recombinant host. In some embodiments, expression of Chim_13 (SEQ ID NO:180) results in increased steviol-1,2-bioside accumulation by a recombinant host. In some embodiments, expression of Chim_13 (SEQ ID NO:180) results in increased RebB accumulation by a recombinant host. In some embodiments, expression of Chim_11 (SEQ ID NO:176), Chim_12 (SEQ ID NO:178), and/or Chim_13 results in increased RebA accumulation by a recombinant host. In some embodiments, expression of Chim_10 (SEQ ID NO:174), Chim_11 (SEQ ID NO:176), Chim_12 (SEQ ID NO:178), and/or Chim_13 (SEQ ID NO:180) results in increased RebD accumulation by a recombinant host. In some embodiments, expression of Chim_10 (SEQ ID NO:174), Chim_11 (SEQ ID NO:176), Chim_12 (SEQ ID NO:178), and/or Chim_13 (SEQ ID NO:180) results in increased RebM accumulation by a recombinant host. In some embodiments, expression of Chim_13 (SEQ ID NO:180) results in increased steviol-1,3-bioside accumulation by a recombinant host. In some embodiments, expression of Chim_11 (SEQ ID NO:176), Chim_12 (SEQ ID NO:178), and/or Chim_13 (SEQ ID NO:180) results in increased 1,2-stevioside accumulation by a recombinant host. In some embodiments, expression of Chim_10 (SEQ ID NO:174) and/or Chim_12 (SEQ ID NO:178) results in increase steviol+5Glc (#24) accumulation by a recombinant host. In some embodiments, expression of Chim_10 (SEQ ID NO:174), Chim_11 (SEQ ID NO:176), Chim_12 (SEQ ID NO:178), and/or Chim_13 (SEQ ID NO:180) results in increased steviol+5Glc (#25) accumulation by a recombinant host. In some embodiments, expression of Chim_10 (SEQ ID NO:174), Chim_11 (SEQ ID NO:176), Chim_12 (SEQ ID NO:178), and/or Chim_13 (SEQ ID NO:180) results in increased steviol+6Glc (isomer 1) accumulation by a recombinant host. In some embodiments, expression of Chim_10 (SEQ ID NO:174), Chim_11 (SEQ ID NO:176), Chim_12 (SEQ ID NO:178), and/or Chim_13 (SEQ ID NO:180) results in increased steviol+6Glc (#23) accumulation by a recombinant host. In some embodiments, expression of Chim_10 (SEQ ID NO:174), Chim_11 (SEQ ID NO:176), Chim_12 (SEQ ID NO:178), and/or Chim_13 (SEQ ID NO:180) results in increased steviol+7Glc (isomer 2) accumulation by a recombinant host. In some embodiments, expression of Chim_10 (SEQ ID NO:174) results in increased steviol+7Glc (isomer 5) accumulation by a recombinant host.

[0366] In some embodiments, expression of Chim_10 (SEQ ID NO:174), Chim_11 (SEQ ID NO:176), and/or Chim_12 (SEQ ID NO:178) results in decreased steviol-1,3-bioside accumulation by a recombinant host. In some embodiments, expression of Chim_10 (SEQ ID NO:174) results in decreased 1,2-stevioside accumulation by a recombinant host. In some embodiments, expression of Chim_10 (SEQ ID NO:174), Chim_11 (SEQ ID NO:176), Chim_12 (SEQ ID NO:178), and/or Chim_13 (SEQ ID NO:180) results in decreased 1,3-stevioside accumulation by a recombinant host. In some embodiments, expression of Chim_10 (SEQ ID NO:174), Chim_11 (SEQ ID NO:176), Chim_12 (SEQ ID NO:178), and/or Chim_13 (SEQ ID NO:180) results in decreased steviol+4Glc (#26) accumulation by a recombinant host. In some embodiments, expression of Chim_10 (SEQ ID NO:174), Chim_11 (SEQ ID NO:176), Chim_12 (SEQ ID NO:178), and/or Chim_13 (SEQ ID NO:180) results in decreased steviol+4Glc (#33) accumulation by a recombinant host. In some embodiments, expression of Chim_11 (SEQ ID NO:176) and/or Chim_13 (SEQ ID NO:180) results in decreased steviol+5Glc (#24) accumulation by a recombinant host. In some embodiments, expression of Chim_11 (SEQ ID NO:176), Chim_12 (SEQ ID NO:178), and/or Chim_13 (SEQ ID NO:180) results in decreased steviol+7Glc (isomer 5) accumulation by a recombinant host. In some embodiments, expression of Chim_10 (SEQ ID NO:174), Chim_11 (SEQ ID NO:176), Chim_12 (SEQ ID NO:178), and/or Chim_13 (SEQ ID NO:180) results in decreased 19-SMG accumulation by a recombinant host. In some embodiments, expression, of Chim_10 (SEQ ID NO:174), Chim_11 (SEQ ID NO:176), and/or Chim_12 (SEQ ID NO:178) results in decreased steviol-1,2-bioside accumulation by a recombinant host. In some embodiments, expression of Chim_10 (SEQ ID NO:174), Chim_11 (SEQ ID NO:176), Chim_12 (SEQ ID NO:178), and/or Chim_13 (SEQ ID NO:180) results in decreased rubusoside accumulation by a recombinant host. In some embodiments, expression of Chim_10 (SEQ ID NO:174), Chim_11 (SEQ ID NO:176), and/or Chim_12 (SEQ ID NO:178) results in decreased RebB accumulation by a recombinant host. In some embodiments, expression of Chim_10 (SEQ ID NO:174) results in decreased RebA accumulation by a recombinant host. In some embodiments, expression of Chim_11 (SEQ ID NO:176), Chim_12 (SEQ ID NO:178), and/or Chim_13 results in decreased RebE accumulation by a recombinant host. In some embodiments, expression of Chim_10 (SEQ ID NO:174), Chim_11 (SEQ ID NO:176), Chim_12 (SEQ ID NO:178), and/or Chim_13 (SEQ ID NO:180) results in decreased ent-kaurenoic acid+2Glc (#7) accumulation by a recombinant host. In some embodiments, expression of Chim_10 (SEQ ID NO:174), Chim_11 (SEQ ID NO:176), Chim_12 (SEQ ID NO:178), and/or Chim_13 (SEQ ID NO:180) results in decreased ent-kaurenoic acid+3Glc (isomer 1) accumulation by a recombinant host. In some embodiments, expression of Chim_10 (SEQ ID NO:174), Chim_11 (SEQ ID NO:176), Chim_12 (SEQ ID NO:178), and/or Chim_13 (SEQ ID NO:180) results in decreased ent-kaurenoic acid+3Glc (isomer 2) accumulation by a recombinant host.

[0367] In some embodiments, a recombinant host comprises a gene encoding a polypeptide capable of glycosylating steviol or a steviol glycoside at its C-19 carboxyl group. In certain such embodiments, the gene encoding a polypeptide capable of glycosylating steviol or a steviol glycoside at its C-19 carboxyl group is a UGT74G1 homolog (e.g., a UGT74G1 homolog having one or more amino acid substitutions corresponding to residues 18, 20, 21, 23, 68, 69, 70, 71, 72, 73, 74, 75, 76, 77, 78, 79, 80, 81, 82, 83, 85, 86, 119, 140, 148, 179, 184, 185, 191, 194, 195, 284, 285, 286, 375, 376, 377, 378 with respect to SEQ ID NO:4). In certain such embodiments the gene encoding a polypeptide capable of glycosylating steviol or a steviol glycoside at its C-19 carboxyl group is a UGT74G1 homolog having a substitution, with respect to SEQ ID NO:4, corresponding to residue 79 (e.g., a valine or a glutamic acid corresponding to residue 79). In certain such embodiments the gene encoding a polypeptide capable of glycosylating steviol or a steviol glycoside at its C-19 carboxyl group is a UGT74G1 homolog having a substitution, with respect to SEQ ID NO:4, corresponding to residue 80 (e.g., a cysteine corresponding to residue 80). In certain such embodiments the gene encoding a polypeptide capable of glycosylating steviol or a steviol glycoside at its C-19 carboxyl group is a UGT74G1 homolog having a substitution, with respect to SEQ ID NO:4, corresponding to residue 81 (e.g., a tryptophan corresponding to residue 81). In certain such embodiments the gene encoding a polypeptide capable of glycosylating steviol or a steviol glycoside at its C-19 carboxyl group is a UGT74G1 homolog having a substitution, with respect to SEQ ID NO:4, corresponding to residue 83 (e.g., a lysine corresponding to residue 83). In certain such embodiments the gene encoding a polypeptide capable of glycosylating steviol or a steviol glycoside at its C-19 carboxyl group is a UGT74G1 homolog having a substitution, with respect to SEQ ID NO:4, corresponding to residue 184 (e.g., a valine or a threonine corresponding to residue 184). In certain such embodiments the gene encoding a polypeptide capable of glycosylating steviol or a steviol glycoside at its C-19 carboxyl group is a UGT74G1 homolog having a substitution, with respect to SEQ ID NO:4, corresponding to residue 260 (e.g., a threonine corresponding to residue 260). In certain such embodiments the gene encoding a polypeptide capable of glycosylating steviol or a steviol glycoside at its C-19 carboxyl group is a UGT74G1 homolog having a substitution, with respect to SEQ ID NO:4, corresponding to residue 286 (e.g., a glutamic acid, a cysteine, an asparagine, or a threonine corresponding to residue 286). In ceratin such embodiments the gene encoding a polypeptide capable of glycosylating steviol or a steviol glycoside at its C-19 carboxyl group is a UGT74G1 homolor having a substitution, with respect to SEQ ID NO:4, corresponding to residue 377 (e.g., a glutamine corresponding to residue 377).

[0368] In some embodiments, a recombinant host comprises a gene encoding a polypeptide capable of glycosylating steviol or a steviol glycoside at its C-19 carboxyl group (e.g., a polypeptide having the amino acid sequence set forth in SEQ ID NO:118, SEQ ID NO:120, SEQ ID NO:122, SEQ ID NO:124, SEQ ID NO:126, SEQ ID NO:128, SEQ ID NO:130, SEQ ID NO:161, SEQ ID NO:163, SEQ ID NO:165, SEQ ID NO:167, or SEQ ID NO:169). In certain embodiments, a recombinant host cell comprising a gene encoding a polypeptide capable of glycosylating steviol or a steviol glycoside at its C-19 carboxyl group (e.g., a polypeptide having the amino acid sequence set forth in SEQ ID NO:118, SEQ ID NO:120, SEQ ID NO:122, SEQ ID NO:124, SEQ ID NO:126, SEQ ID NO:128, SEQ ID NO:130, SEQ ID NO:161, SEQ ID NO:163, SEQ ID NO:165, SEQ ID NO:167, or SEQ ID NO:169) further comprises a gene encoding a polypeptide capable of glycosylating steviol or a steviol glycoside at its C-13 hydroxyl group (e.g., a polypeptide having the amino acid sequence set forth in SEQ ID NO:7); a gene encoding a polypeptide capable of beta 1,3 glycosylation of the C3′ of the 13-O-glucose, 19-O-glucose, or both 13-O-glucose and 19-O-glucose of a steviol glycoside (e.g., a polypeptide having the amino acid sequence set forth in SEQ ID NO:9); a gene encoding a polypeptide capable of glycosylating steviol or a steviol glycoside at its C-19 carboxyl group (e.g., a polypeptide having the amino acid sequence set forth in SEQ ID NO:4); and/or a gene encoding a polypeptide capable of beta 1,2 glycosylation of the C2′ of the 13-O-glucose, 19-O-glucose, or both 13-O-glucose and 19-O-glucose of a steviol glycoside (e.g., a polypeptide having the amino acid sequence set forth in SEQ ID NO:11, SEQ ID NO:13, or SEQ ID NO:16). In certain such embodiments, the recombinant host cell further comprises a gene encoding a polypeptide capable of synthesizing GGPP from FPP and IPP (e.g., a polypeptide having the amino acid sequence set forth in SEQ ID NO:20); a gene encoding a polypeptide capable of synthesizing ent-copalyl diphosphate from GGPP (e.g., a polypeptide having the amino acid sequence set forth in SEQ ID NO:40); a gene encoding a polypeptide capable of synthesizing ent-kaurene from ent-copalyl diphosphate (e.g., a polypeptide having the amino acid sequence set forth in SEQ ID NO:52); a gene encoding a polypeptide capable of synthesizing ent-kaurenoic acid, ent-kaurenol, and/or ent-kaurenol from ent-kaurene (e.g., a polypeptide having the amino acid sequence set forth in SEQ ID NO:60 or SEQ ID NO:117); a gene encoding a polypeptide capable of reducing cytochrome P450 complex (e.g., a polypeptide having the amino acid sequence set forth in SEQ ID NO:78, SEQ ID NO:86, or SEQ ID NO:92); and/or a gene encoding a polypeptide capable of synthesizing steviol from ent-kaurenoic acid (e.g., a polypeptide having the amino acid sequence set forth in SEQ ID NO:94).

[0369] In some embodiments, a recombinant host comprises a gene encoding a bifunctional polypeptide capable of glycosylating steviol or a steviol glycoside at its C-19 carboxyl group and glycosylating steviol or a steviol glycoside at its C-13 hydroxyl group. In certain such embodiments, the polypeptide is a UGT74G1-b-UGT85C2 chimeric polypeptide (e.g., a polypeptide having the amino acid sequence set forth in SEQ ID NO:134, SEQ ID NO:136, SEQ ID NO:144, SEQ ID NO:146, or SEQ ID NO:148). In certain such embodiments, the polypeptide is a UGT85C2-b-UGT74G1 chimeric polypeptide (e.g., a polypeptide having the amino acid sequence set forth in SEQ ID NO:132, SEQ ID NO:138, SEQ ID NO:140, or SEQ ID NO:142).

[0370] In some embodiments, a recombinant host comprises a gene encoding a bifunctional polypeptide capable of glycosylating steviol or a steviol glycoside at its C-19 carboxyl group and glycosylating steviol or a steviol glycoside at its C-13 hydroxyl group (e.g., SEQ ID NO:132, SEQ ID NO:134, SEQ ID NO:136, SEQ ID NO:138, SEQ ID NO:140, SEQ ID NO:142, SEQ ID NO:144, SEQ ID NO:146, or SEQ ID NO:148). In some embodiments, a recombinant host comprising a gene encoding a bifunctional polypeptide capable of glycosylating steviol or a steviol glycoside at its C-19 carboxyl group and glycosylating steviol or a steviol glycoside at its C-13 hydroxyl group (e.g., SEQ ID NO:132, SEQ ID NO:134, SEQ ID NO:136, SEQ ID NO:138, SEQ ID NO:140, SEQ ID NO:142, SEQ ID NO:144, SEQ ID NO:146, or SEQ ID NO:148) further comprises a gene encoding a polypeptide capable of glycosylating steviol or a steviol glycoside at its C-13 hydroxyl group (e.g., a polypeptide having the amino acid sequence set forth in SEQ ID NO:7); a gene encoding a polypeptide capable of beta 1,3 glycosylation of the C3′ of the 13-O-glucose, 19-O-glucose, or both 13-O-glucose and 19-O-glucose of a steviol glycoside (e.g., a polypeptide having the amino acid sequence set forth in SEQ ID NO:9); a gene encoding a polypeptide capable of glycosylating steviol or a steviol glycoside at its C-19 carboxyl group (e.g., a polypeptide having the amino acid sequence set forth in SEQ ID NO:4); and/or a gene encoding a polypeptide capable of beta 1,2 glycosylation of the C2′ of the 13-O-glucose, 19-O-glucose, or both 13-O-glucose and 19-O-glucose of a steviol glycoside (e.g., a polypeptide having the amino acid sequence set forth in SEQ ID NO:11, SEQ ID NO:13, or SEQ ID NO:16). In certain such embodiments, the recombinant host cell further comprises a gene encoding a polypeptide capable of synthesizing GGPP from FPP and IPP (e.g., a polypeptide having the amino acid sequence set forth in SEQ ID NO:20); a gene encoding a polypeptide capable of synthesizing ent-copalyl diphosphate from GGPP (e.g., a polypeptide having the amino acid sequence set forth in SEQ ID NO:40); a gene encoding a polypeptide capable of synthesizing ent-kaurene from ent-copalyl diphosphate (e.g., a polypeptide having the amino acid sequence set forth in SEQ ID NO:52); a gene encoding a polypeptide capable of synthesizing ent-kaurenoic acid, ent-kaurenol, and/or ent-kaurenal from ent-kaurene (e.g., a polypeptide having the amino acid sequence set forth in SEQ ID NO:60 or SEQ ID NO:117); a gene encoding a polypeptide capable of reducing cytochrome P450 complex (e.g., a polypeptide having the amino acid sequence set forth in SEQ ID NO:78, SEQ ID NO:86, or SEQ ID NO:92); and/or a gene encoding a polypeptide capable of synthesizing steviol from ent-kaurenoic acid (e.g., a polypeptide having the amino acid sequence set forth in SEQ ID NO:94).

[0371] In some embodiments, a recombinant host comprises a gene encoding a tagged polypeptide comprising a polypeptide capable of glycosylating steviol or a steviol glycoside at its C-19 carboxyl group (e.g., a UGT74G1 homolog; e.g., a polypeptide having the amino acid sequence set forth in SEQ ID NO:4) and a tag (e.g., a tag having the amino acid sequence set forth in SEQ ID NO:152, SEQ ID NO:153, SEQ ID NO:154, or SEQ ID NO:155), joined through a linker (e.g., a linker having the amino acid sequence set forth in SEQ ID NO:151).

[0372] In some embodiments, a recombinant host comprises a gene encoding a tagged polypeptide capable of glycosylating steviol or a steviol glycoside at its C-19 carboxyl group (e.g., a polypeptide having the amino acid sequence set forth in SEQ ID NO:174, SEQ ID NO:176, SEQ ID NO:178, or SEQ ID NO:180). In some embodiments, a recombinant host comprising a gene encoding a tagged polypeptide capable of glycosylating steviol or a steviol glycoside at its C-19 carboxyl group (e.g., a polypeptide having the amino acid sequence set forth in SEQ ID NO:174, SEQ ID NO:176, SEQ ID NO:178, or SEQ ID NO:180) further comprises a gene encoding a polypeptide capable of glycosylating steviol or a steviol glycoside at its C-13 hydroxyl group (e.g., a polypeptide having the amino acid sequence set forth in SEQ ID NO:7); a gene encoding a polypeptide capable of beta 1,3 glycosylation of the C3′ of the 13-O-glucose, 19-O-glucose, or both 13-O-glucose and 19-O-glucose of a steviol glycoside (e.g., a polypeptide having the amino acid sequence set forth in SEQ ID NO:9); a gene encoding a polypeptide capable of glycosylating steviol or a steviol glycoside at its C-19 carboxyl group (e.g., a polypeptide having the amino acid sequence set forth in SEQ ID NO:4); and/or a gene encoding a polypeptide capable of beta 1,2 glycosylation of the C2′ of the 13-O-glucose, 19-O-glucose, or both 13-O-glucose and 19-O-glucose of a steviol glycoside (e.g., a polypeptide having the amino acid sequence set forth in SEQ ID NO:11, SEQ ID NO:13, or SEQ ID NO:16). In certain such embodiments, the recombinant host cell further comprises a gene encoding a polypeptide capable of synthesizing GGPP from FPP and IPP (e.g., a polypeptide having the amino acid sequence set forth in SEQ ID NO:20); a gene encoding a polypeptide capable of synthesizing ent-copalyl diphosphate from GGPP (e.g., a polypeptide having the amino acid sequence set forth in SEQ ID NO:40); a gene encoding a polypeptide capable of synthesizing ent-kaurene from ent-copalyl diphosphate (e.g., a polypeptide having the amino acid sequence set forth in SEQ ID NO:52); a gene encoding a polypeptide capable of synthesizing ent-kaurenoic acid, ent-kaurenol, and/or ent-kaurenal from ent-kaurene (e.g., a polypeptide having the amino acid sequence set forth in SEQ ID NO:60 or SEQ ID NO:117); a gene encoding a polypeptide capable of reducing cytochrome P450 complex (e.g., a polypeptide having the amino acid sequence set forth in SEQ ID NO:78, SEQ ID NO:86, or SEQ ID NO:92); and/or a gene encoding a polypeptide capable of synthesizing steviol from ent-kaurenoic acid (e.g., a polypeptide having the amino acid sequence set forth in SEQ ID NO:94).

[0373] In some embodiments, one or more steviol glycosides and/or glycosylated steviol precursors, or a composition thereof is produced by whole cell bioconversion. In some embodiments, the method for producing one or more steviol glycosides and/or glycosylated steviol precursors, or a composition thereof as disclosed herein comprises whole cell bioconversion of a plant-derived or synthetic steviol glycoside precursor or a plant-derived or synthetic steviol precursor in a cell culture medium of a recombinant host cell using (a) a polypeptide capable of glycosylating steviol or a steviol glycoside at its C-19 carboxyl group having at least 55% sequence identity to the amino acid sequence set forth in SEQ ID NO:4, and further having at least one amino acid substitution corresponding to residues 79, 80, 81, 83, 184, 260, 286, or 377 of SEQ ID NO:4; (b) a polypeptide capable of glycosylating steviol or a steviol glycoside at its C-19 carboxyl group having at least 55% sequence identity to the amino acid sequence set forth in SEQ ID NO:4, and further having at least one amino acid substitution corresponding to residues 68, 69, 70, 71, 72, 73, 74, 75, 76, 77, 78, 79, 80, 81, 82, or 83 of SEQ ID NO:4; (c) a bifunctional polypeptide capable of glycosylating steviol or a steviol glycoside at its C-19 carboxyl group and glycosylating steviol or a steviol glycoside at its C-13 hydroxyl group, having at least 50% sequence identity to the amino acid sequence set forth in SEQ ID NO:132, SEQ ID NO:134, SEQ ID NO:136, SEQ ID NO:138, SEQ ID NO:140, or SEQ ID NO:142, SEQ ID NO:144, SEQ ID NO:146, or SEQ ID NO:148; and/or (d) a tagged polypeptide capable of glycosylating steviol or a steviol glycoside at its C-19 carboxyl group, having at least 55% sequence identity to the amino acid sequence set forth in SEQ ID NO:174, SEQ ID NO:176, SEQ ID NO:178, or SEQ ID NO:180; wherein at least one of the polypeptides is a recombinant polypeptide expressed in the recombinant host cell; and producing the one or more steviol glycosides and/or glycosylated steviol precursors, or a composition thereof, thereby.

[0374] In some embodiments, a steviol glycoside or steviol glycoside precursor composition produced in vivo, in vitro, or by whole cell bioconversion comprises fewer contaminants or less of any particular contaminant than a stevia extract from, inter alia, a stevia plant. Contaminants can include plant-derived compounds that contribute to off-flavors. Potential contaminants include pigments, lipids, proteins, phenolics, saccharides, spathulenol and other sesquiterpenes, labdane diterpenes, monoterpenes, decanoic acid, 8,11,14-eicosatrienoic acid, 2-methyloctadecane, pentacosane, octacosane, tetracosane, octadecanol, stigmasterol, β-sitosterol, α-amyrin, β-amyrin, lupeol, β-amryin acetate, pentacyclic triterpenes, centauredin, quercitin, epi-alpha-cadinol, carophyllenes and derivatives, beta-pinene, beta-sitosterol, and gibberellin.

[0375] As used herein, the terms “detectable amount,” “detectable concentration,” “measurable amount,” and “measurable concentration” refer to a level of steviol glycosides measured in AUC, μM/OD₆₀₀, mg/L, μM, or mM. Steviol glycoside production (i.e., total, supernatant, and/or intracellular steviol glycoside levels) can be detected and/or analyzed by techniques generally available to one skilled in the art, for example, but not limited to, liquid chromatography-mass spectrometry (LC-MS), thin layer chromatography (TLC), high-performance liquid chromatography (HPLC), ultraviolet-visible spectroscopy/spectrophotometry (UV-Vis), mass spectrometry (MS), and NMR.

[0376] As used herein, the term “undetectable concentration” refers to a level of a compound that is too low to be measured and/or analyzed by techniques such as TLC, HPLC, UV-Vis, MS, or NMR. In some embodiments, a compound of an “undetectable concentration” is not present in a steviol glycoside or steviol glycoside precursor composition.

[0377] As used herein, the terms “or” and “and/or” is utilized to describe multiple components in combination or exclusive of one another. For example, “x, y, and/or z” can refer to “x” alone, “y” alone, “z” alone, “x, y, and z,” “(x and y) or z,” “x or (y and z),” or “x or y or z.” In some embodiments, “and/or” is used to refer to the exogenous nucleic acids that a recombinant cell comprises, wherein a recombinant cell comprises one or more exogenous nucleic acids selected from a group. In some embodiments, “and/or” is used to refer to production of steviol glycosides and/or steviol glycoside precursors. In some embodiments, “and/or” is used to refer to production of steviol glycosides, wherein one or more steviol glycosides are produced. In some embodiments, “and/or” is used to refer to production of steviol glycosides, wherein one or more steviol glycosides are produced through one or more of the following steps: culturing a recombinant microorganism, synthesizing one or more steviol glycosides in a recombinant microorganism, and/or isolating one or more steviol glycosides.

### Functional Homologs

[0378] Functional homologs of the polypeptides described above are also suitable for use in producing steviol glycosides in a recombinant host. A functional homolog is a polypeptide that has sequence similarity to a reference polypeptide, and that carries out one or more of the biochemical or physiological function(s) of the reference polypeptide. A functional homolog and the reference polypeptide can be a natural occurring polypeptide, and the sequence similarity can be due to convergent or divergent evolutionary events. As such, functional homologs are sometimes designated in the literature as homologs, or orthologs, or paralogs. Variants of a naturally occurring functional homolog, such as polypeptides encoded by mutants of a wild type coding sequence, can themselves be functional homologs. Functional homologs can also be created via site-directed mutagenesis of the coding sequence for a polypeptide, or by combining domains from the coding sequences for different naturally-occurring polypeptides (“domain swapping”). Techniques for modifying genes encoding functional polypeptides described herein are known and include, inter alia, directed evolution techniques, site-directed mutagenesis techniques and random mutagenesis techniques, and can be useful to increase specific activity of a polypeptide, alter substrate specificity, alter expression levels, alter subcellular location, or modify polypeptide-polypeptide interactions in a desired manner. Such modified polypeptides are considered functional homologs. The term “functional homolog” is sometimes applied to the nucleic acid that encodes a functionally homologous polypeptide.

[0379] Functional homologs can be identified by analysis of nucleotide and polypeptide sequence alignments. For example, performing a query on a database of nucleotide or polypeptide sequences can identify homologs of steviol glycoside biosynthesis polypeptides. Sequence analysis can involve BLAST, Reciprocal BLAST, or PSI-BLAST analysis of non-redundant databases using a UGT amino acid sequence as the reference sequence. Amino acid sequence is, in some instances, deduced from the nucleotide sequence. Those polypeptides in the database that have greater than 40% sequence identity are candidates for further evaluation for suitability as a steviol glycoside biosynthesis polypeptide. Amino acid sequence similarity allows for conservative amino acid substitutions, such as substitution of one hydrophobic residue for another or substitution of one polar residue for another. If desired, manual inspection of such candidates can be carried out in order to narrow the number of candidates to be further evaluated. Manual inspection can be performed by selecting those candidates that appear to have domains present in steviol glycoside biosynthesis polypeptides, e.g., conserved functional domains. In some embodiments, nucleic acids and polypeptides are identified from transcriptome data based on expression levels rather than by using BLAST analysis.

[0380] Conserved regions can be identified by locating a region within the primary amino acid sequence of a steviol glycoside biosynthesis polypeptide that is a repeated sequence, forms some secondary structure (e.g., helices and beta sheets), establishes positively or negatively charged domains, or represents a protein motif or domain. See, e.g., the Pfam web site describing consensus sequences for a variety of protein motifs and domains on the World Wide Web at sanger.ac.uk/Software/Pfam/ and pfam.janelia.org/. The information included at the Pfam database is described in Sonnhammer et al., Nucl. Acids Res., 26:320-322 (1998); Sonnhammer et al., Proteins, 28:405-420 (1997); and Bateman et al., Nucl. Acids Res., 27:260-262 (1999). Conserved regions also can be determined by aligning sequences of the same or related polypeptides from closely related species. Closely related species preferably are from the same family. In some embodiments, alignment of sequences from two different species is adequate to identify such homologs.

[0381] Typically, polypeptides that exhibit at least about 40% amino acid sequence identity are useful to identify conserved regions. Conserved regions of related polypeptides exhibit at least 45% amino acid sequence identity (e.g., at least 50%, at least 60%, at least 70%, at least 80%, or at least 90% amino acid sequence identity). In some embodiments, a conserved region exhibits at least 92%, 94%, 96%, 98%, or 99% amino acid sequence identity.

[0382] For example, polypeptides suitable for producing steviol in a recombinant host include functional homologs of UGTs.

[0383] Methods to modify the substrate specificity of, for example, a UGT, are known to those skilled in the art, and include without limitation site-directed/rational mutagenesis approaches, random directed evolution approaches and combinations in which random mutagenesis/saturation techniques are performed near the active site of the enzyme. For example see Osmani et al., 2009, Phytochemistry 70: 325-347.

[0384] A candidate sequence typically has a length that is from 80% to 250% of the length of the reference sequence, e.g., 82, 85, 87, 89, 90, 93, 95, 97, 99, 100, 105, 110, 115, 120, 130, 140, 150, 160, 170, 180, 190, 200, 210, 220, 230, 240, or 250% of the length of the reference sequence. A functional homolog polypeptide typically has a length that is from 95% to 105% of the length of the reference sequence, e.g., 90, 93, 95, 97, 99, 100, 105, 110, 115, or 120% of the length of the reference sequence, or any range between. A % identity for any candidate nucleic acid or polypeptide relative to a reference nucleic acid or polypeptide can be determined as follows. A reference sequence (e.g., a nucleic acid sequence or an amino acid sequence described herein) is aligned to one or more candidate sequences using the computer program Clustal Omega (version 1.2.1, default parameters), which allows alignments of nucleic acid or polypeptide sequences to be carried out across their entire length (global alignment). Chenna et al., 2003, Nucleic Acids Res. 31(13):3497-500.

[0385] ClustalW calculates the best match between a reference and one or more candidate sequences, and aligns them so that identities, similarities and differences can be determined. Gaps of one or more residues can be inserted into a reference sequence, a candidate sequence, or both, to maximize sequence alignments. For fast pairwise alignment of nucleic acid sequences, the following default parameters are used: word size: 2; window size: 4; scoring method: % age; number of top diagonals: 4; and gap penalty: 5. For multiple alignment of nucleic acid sequences, the following parameters are used: gap opening penalty: 10.0; gap extension penalty: 5.0; and weight transitions: yes. For fast pairwise alignment of protein sequences, the following parameters are used: word size: 1; window size: 5; scoring method:% age; number of top diagonals: 5; gap penalty: 3. For multiple alignment of protein sequences, the following parameters are used: weight matrix: blosum; gap opening penalty: 10.0; gap extension penalty: 0.05; hydrophilic gaps: on; hydrophilic residues: Gly, Pro, Ser, Asn, Asp, Gln, Glu, Arg, and Lys; residue-specific gap penalties: on. The ClustalW output is a sequence alignment that reflects the relationship between sequences. ClustalW can be run, for example, at the Baylor College of Medicine Search Launcher site on the World Wide Web (searchlauncher.bcm.tmc.edu/multi-align/multi-align.html) and at the European Bioinformatics Institute site on the World Wide Web (ebi.ac.uk/clustalw).

[0386] To determine a % identity of a candidate nucleic acid or amino acid sequence to a reference sequence, the sequences are aligned using Clustal Omega, the number of identical matches in the alignment is divided by the length of the reference sequence, and the result is multiplied by 100. It is noted that the% identity value can be rounded to the nearest tenth. For example, 78.11, 78.12, 78.13, and 78.14 are rounded down to 78.1, while 78.15, 78.16, 78.17, 78.18, and 78.19 are rounded up to 78.2.

[0387] It will be appreciated that functional UGT (e.g., a polypeptide capable of glycosylating steviol or a steviol glycoside at its C-13 hydroxyl group; a polypeptide capable of beta 1,3 glycosylation of the C3’ of the 13-O-glucose, 19-O-glucose, or both 13-O-glucose and 19-O-glucose of a steviol glycoside; a polypeptide capable of glycosylating steviol or a steviol glycoside at its C-19 carboxyl group; and/or a polypeptide capable of beta 1,2 glycosylation of the C2′ of the 13-O-glucose, 19-O-glucose, or both 13-O-glucose and 19-O-glucose of a steviol glycoside) proteins can include additional amino acids that are not involved in the enzymatic activities carried out by the enzymes. In some embodiments, UGT proteins are fusion proteins. The terms “chimera,” “fusion polypeptide,” “fusion protein,” “fusion enzyme,” “fusion construct,” “chimeric protein,” “chimeric polypeptide,” “chimeric construct,” and “chimeric enzyme” can be used interchangeably herein to refer to proteins engineered through the joining of two or more genes that code for different proteins.

[0388] In some embodiments, a chimeric enzyme is constructed by joining the C-terminal of a first polypeptide ProteinA to the N-terminal of a second polypeptide ProteinB through a linker “b,” “ProteinA-b-ProteinB.” In some aspects, the linker of a chimeric enzyme may be the amino acid sequence “KLVK.” In some aspects, the linker of a chimeric enzyme may be the amino acid sequence “RASSTKLVK” (SEQ ID NO:150) In some aspects, the linker of a chimeric enzyme may be the amino acid sequence “GGGGS.” In some aspects, the linker of a chimeric enzyme may be two repeats of the amino acid sequence “GGGGS” “GGGGSGGGGS”). In some aspects, the linker of a chimeric enzyme may be three repeats of the amino acid sequence “GGGGS.” In some aspects, the linker of a chimeric enzyme may be the amino acid sequence “EGKSSGSGSESKST” (SEQ ID NO:151). In some aspects, the linker of a chimeric enzyme is a direct bond between the C-terminal of a first polypeptide and the N-terminal of a second polypeptide. In some embodiments, a chimeric enzyme is constructed by joining the C-terminal of a first polypeptide ProteinA to the N-terminal of a second polypeptide ProteinB through a linker “b,” “ProteinA-b-ProteinB” and by joining the C-terminal of the second polypeptide ProteinB to the N-terminal of a third polypeptide ProteinC through a second linker “d,” “ProteinA-b-ProteinB-d-ProteinC.

[0389] In some embodiments, a nucleic acid sequence encoding a UGT polypeptide (e.g., a polypeptide capable of glycosylating steviol or a steviol glycoside at its C-13 hydroxyl group; a polypeptide capable of beta 1,3 glycosylation of the C3′ of the 13-O-glucose, 19-O-glucose, or both 13-O-glucose and 19-O-glucose of a steviol glycoside; a polypeptide capable of glycosylating steviol or a steviol glycoside at its C-19 carboxyl group; and/or a polypeptide capable of beta 1,2 glycosylation of the C2′ of the 13-O-glucose, 19-O-glucose, or both 13-O-glucose and 19-O-glucose of a steviol glycoside) can include a tag sequence that encodes a “tag” designed to facilitate subsequent manipulation (e.g., to facilitate purification or detection), solubility, secretion, or localization of the encoded polypeptide. Tag sequences can be inserted in the nucleic acid sequence encoding the polypeptide such that the encoded tag is located at either the carboxyl (i.e., C-terminal) or amino terminus (i.e., N-terminal) of the polypeptide. Non-limiting examples of encoded tags include green fluorescent protein (GFP), human influenza hemagglutinin (HA), glutathione S transferase (GST), polyhistidine-tag (HIS tag), disulfide oxiodoreductase (DsbA) (e.g., SEQ ID NO:156), maltose binding protein (MBP) (e.g., SEQ ID NO:157), N-utilization substance (NusA) (e.g., SEQ ID NO:158), and small ubiquitin-like modifier (SUMO) (e.g., SEQ ID NO:159). Other examples of tags include a chloroplast transit peptide, a mitochondrial transit peptide, an amyloplast peptide, signal peptide, or a secretion tag. In some embodiments, a tag is attached to a polypeptide capable of glycosylating steviol or a steviol glycoside at its C-19 carboxyl group. In some embodiments, the tag is attached to a polypeptide capable of glycosylating steviol or a steviol glycoside at its C-19 carboxyl group using a linker of SEQ ID NO:151. See Examples 5 and 7-9.

[0390] In some embodiments, a fusion protein is a protein altered by domain swapping. As used herein, the term “domain swapping” is used to describe the process of replacing a domain of a first protein with a domain of a second protein. In some embodiments, the domain of the first protein and the domain of the second protein are functionally identical or functionally similar. In some embodiments, the structure and/or sequence of the domain of the second protein differs from the structure and/or sequence of the domain of the first protein. In some embodiments, a UGT polypeptide is altered by domain swapping.

[0391] In some embodiments, a fusion protein is a protein altered by circular permutation, which consists in the covalent attachment of the ends of a protein that would be opened elsewhere afterwards. Thus, the order of the sequence is altered without causing changes in the amino acids of the protein. In some embodiments, a targeted circular permutation can be produced, for example but not limited to, by designing a spacer to join the ends of the original protein. Once the spacer has been defined, there are several possibilities to generate permutations through generally accepted molecular biology techniques, for example but not limited to, by producing concatemers by means of PCR and subsequent amplification of specific permutations inside the concatemer or by amplifying discrete fragments of the protein to exchange to join them in a different order. The step of generating permutations can be followed by creating a circular gene by binding the fragment ends and cutting back at random, thus forming collections of permutations from a unique construct. In some embodiments, DAPI polypeptide is altered by circular permutation.

### Steviol and Steviol Glycoside Biosynthesis Nucleic Acids

[0392] A recombinant gene encoding a polypeptide described herein comprises the coding sequence for that polypeptide, operably linked in sense orientation to one or more regulatory regions suitable for expressing the polypeptide. Because many microorganisms are capable of expressing multiple gene products from a polycistronic mRNA, multiple polypeptides can be expressed under the control of a single regulatory region for those microorganisms, if desired. A coding sequence and a regulatory region are considered to be operably linked when the regulatory region and coding sequence are positioned so that the regulatory region is effective for regulating transcription or translation of the sequence. Typically, the translation initiation site of the translational reading frame of the coding sequence is positioned between one and about fifty nucleotides downstream of the regulatory region for a monocistronic gene.

[0393] In many cases, the coding sequence for a polypeptide described herein is identified in a species other than the recombinant host, i.e., is a heterologous nucleic acid. Thus, if the recombinant host is a microorganism, the coding sequence can be from other prokaryotic or eukaryotic microorganisms, from plants or from animals. In some case, however, the coding sequence is a sequence that is native to the host and is being reintroduced into that organism. A native sequence can often be distinguished from the naturally occurring sequence by the presence of non-natural sequences linked to the exogenous nucleic acid, e.g., non-native regulatory sequences flanking a native sequence in a recombinant nucleic acid construct. In addition, stably transformed exogenous nucleic acids typically are integrated at positions other than the position where the native sequence is found. “Regulatory region” refers to a nucleic acid having nucleotide sequences that influence transcription or translation initiation and rate, and stability and/or mobility of a transcription or translation product. Regulatory regions include, without limitation, promoter sequences, enhancer sequences, response elements, protein recognition sites, inducible elements, protein binding sequences, 5′ and 3′ untranslated regions (UTRs), transcriptional start sites, termination sequences, polyadenylation sequences, introns, and combinations thereof. A regulatory region typically comprises at least a core (basal) promoter. A regulatory region also may include at least one control element, such as an enhancer sequence, an upstream element or an upstream activation region (UAR). A regulatory region is operably linked to a coding sequence by positioning the regulatory region and the coding sequence so that the regulatory region is effective for regulating transcription or translation of the sequence. For example, to operably link a coding sequence and a promoter sequence, the translation initiation site of the translational reading frame of the coding sequence is typically positioned between one and about fifty nucleotides downstream of the promoter. A regulatory region can, however, be positioned as much as about 5,000 nucleotides upstream of the translation initiation site, or about 2,000 nucleotides upstream of the transcription start site.

[0394] The choice of regulatory regions to be included depends upon several factors, including, but not limited to, efficiency, selectability, inducibility, desired expression level, and preferential expression during certain culture stages. It is a routine matter for one of skill in the art to modulate the expression of a coding sequence by appropriately selecting and positioning regulatory regions relative to the coding sequence. It will be understood that more than one regulatory region may be present, e.g., introns, enhancers, upstream activation regions, transcription terminators, and inducible elements.

[0395] One or more genes can be combined in a recombinant nucleic acid construct in “modules” useful for a discrete aspect of steviol and/or steviol glycoside production. Combining a plurality of genes in a module, particularly a polycistronic module, facilitates the use of the module in a variety of species. For example, a steviol biosynthesis gene cluster, or a UGT gene cluster, can be combined in a polycistronic module such that, after insertion of a suitable regulatory region, the module can be introduced into a wide variety of species. As another example, a UGT gene cluster can be combined such that each UGT coding sequence is operably linked to a separate regulatory region, to form a UGT module. Such a module can be used in those species for which monocistronic expression is necessary or desirable. In addition to genes useful for steviol or steviol glycoside production, a recombinant construct typically also contains an origin of replication, and one or more selectable markers for maintenance of the construct in appropriate species.

[0396] It will be appreciated that because of the degeneracy of the genetic code, a number of nucleic acids can encode a particular polypeptide; i.e., for many amino acids, there is more than one nucleotide triplet that serves as the codon for the amino acid. Thus, codons in the coding sequence for a given polypeptide can be modified such that optimal expression in a particular host is obtained, using appropriate codon bias tables for that host (e.g., microorganism). As isolated nucleic acids, these modified sequences can exist as purified molecules and can be incorporated into a vector or a virus for use in constructing modules for recombinant nucleic acid constructs.

[0397] In some cases, it is desirable to inhibit one or more functions of an endogenous polypeptide in order to divert metabolic intermediates towards steviol or steviol glycoside biosynthesis. For example, it may be desirable to downregulate synthesis of sterols in a yeast strain in order to further increase steviol or steviol glycoside production, e.g., by downregulating squalene epoxidase. As another example, it may be desirable to inhibit degradative functions of certain endogenous gene products, e.g., glycohydrolases that remove glucose moieties from secondary metabolites or phosphatases as discussed herein. In such cases, a nucleic acid that overexpresses the polypeptide or gene product may be included in a recombinant construct that is transformed into the strain. Alternatively, mutagenesis can be used to generate mutants in genes for which it is desired to increase or enhance function.

[0398] One aspect of the disclosure is a nucleic acid molecule encoding a polypeptide capable of glycosylating steviol or a steviol glycoside at its C-19 carboxyl group or a catalytically active portion thereof. In one aspect, the nucleic acid is an isolated nucleic acid. In one aspect, the nucleic acid is cDNA. In some embodiments, the encoded polypeptide capable of glycosylating steviol or a steviol glycoside at its C-19 carboxyl group or the catalytically active portion thereof comprises a polypeptide having the amino acid sequence set forth in SEQ ID NO:4, and further having at least one amino acid substitution corresponding to residues 79, 80, 81, 83, 184, 260, 286, or 377 of SEQ ID NO:4. In some embodiments, the encoded polypeptide capable of glycosylating steviol or a steviol glycoside at its C-19 carboxyl group or the catalytically active portion thereof comprises a polypeptide having the amino acid sequence set forth in SEQ ID NO:4, and further having at least one amino acid substitution corresponding to residues 68, 69, 70, 71, 72, 73, 74, 75, 76, 77, 78, 79, 80, 81, 82, or 83 of SEQ ID NO:4. In some embodiments, the encoded polypeptide capable of glycosylating steviol or a steviol glycoside at its C-19 carboxyl group or the catalytically active portion thereof comprises a polypeptide having the amino acid sequence set forth in SEQ ID NO:4, and further having a M79V, M79E, S80C, A81W, E83K, H184V, H184T N260T, K286C, K286E, K286N, K286T, and/or S377Q substitution corresponding to SEQ ID NO:4. In some embodiments, the encoded polypeptide capable of glycosylating steviol or a steviol glycoside at its C-19 carboxyl group or the catalytically active portion thereof comprises a polypeptide having the amino acid sequence set forth in SEQ ID NO:4, and further having a K286C substitution corresponding to SEQ ID NO:4 SEQ ID NO:118); a M79V substitution corresponding to SEQ ID NO:4 SEQ ID NO:120); a S377Q substitution corresponding to SEQ ID NO:4 SEQ ID NO:122); a S800 substitution corresponding to SEQ ID NO:4 SEQ ID NO:124); a N260T and a K286C substitution corresponding to SEQ ID NO:4 SEQ ID NO:126); a H184V substitution corresponding to SEQ ID NO:4 SEQ ID NO:128); a A81W and a E83K substitution corresponding to SEQ ID NO:4 SEQ ID NO:130); a A81W substitution corresponding to SEQ ID NO:4 SEQ ID NO:161); a H184T substitution corresponding to SEQ ID NO:4 (i.e., SEQ ID NO:163); a K286N substitution corresponding to SEQ ID NO:4 SEQ ID NO:165); a M79E substitution corresponding to SEQ ID NO:4 SEQ ID NO:167); or a K286T substitution corresponding to SEQ ID NO:4 SEQ ID NO:169). In some embodiments, the encoded polypeptide capable of glycosylating steviol or a steviol glycoside at its C-19 carboxyl group or the catalytically active portion thereof further comprises a tag, e.g., a tag having the amino acid sequence set forth in SEQ ID NO:152, SEQ ID NO:153, SEQ ID NO:154, or SEQ ID NO:155.

[0399] Another aspect of the disclosure is a nucleic acid molecule encoding a tagged polypeptide capable of glycosylating steviol or a steviol glycoside at its C-19 carboxyl group or a catalytically active portion thereof. In one aspect, the nucleic acid is an isolated nucleic acid. In one aspect, the nucleic acid is cDNA. In some embodiments, the encoded tagged polypeptide capable of glycosylating steviol or a steviol glycoside at its C-19 carboxyl group or the catalytically active portion thereof comprises a polypeptide capable of glycosylating steviol or a steviol glycoside at its C-19 carboxyl group (e.g., a UGT74G1 polypeptide, e.g., a polypeptide having the amino acid sequence set forth in SEQ ID NO:4) and a tag (e.g., a tag having the amino acid sequence set forth in SEQ ID NO:152, SEQ ID NO:153, SEQ ID NO:154, or SEQ ID NO:155), joined through a linker. In some embodiments, the linker may be the amino acid sequence “KLVK.” In some embodiments, the linker may the amino acid sequence “EGKSSGSGSESKST” (SEQ ID NO:151). In some embodiments, the linker is the amino acid sequence RASSTKLVK″ (SEQ ID NO:150). In some embodiments, the linker is the amino acid sequence “GGGGS.” In some embodiments, the linker is two repeats of the amino acid sequence “GGGGS” “GGGGSGGGGS”). In some embodiments, the linker is three repeats of the amino acid sequence “GGGGS.” In some embodiments, the linker is a direct bond (i.e., between the C-terminal of a first polypeptide and the N-terminal of a second polypeptide). In some embodiments, the encoded tagged polypeptide capable of glycosylating steviol or a steviol glycoside at its C-19 carboxyl group or the catalytically active portion thereof comprises a polypeptide capable of glycosylating steviol or a steviol glycoside at its C-19 carboxyl group (e.g., a UGT74G1 polypeptide, e.g., a polypeptide having the amino acid sequence set forth in SEQ ID NO:4) joined at its N-terminal to the C-terminal of a tag (e.g., a tag having the amino acid sequence set forth in SEQ ID NO:152, SEQ ID NO:153, SEQ ID NO:154, or SEQ ID NO:155). In some embodiments, the encoded tagged polypeptide capable of glycosylating steviol or a steviol glycoside at its C-19 carboxyl group or the catalytically active portion thereof comprises a polypeptide having the amino acid sequence set forth in SEQ ID NO: 174, SEQ ID NO:176, SEQ ID NO:178, or SEQ ID NO:180.

[0400] Another aspect of the disclosure is a nucleic acid molecule encoding a bifunctional polypeptide capable of glycosylating steviol or a steviol glycoside at its C-19 carboxyl group and glycosylating steviol or a steviol glycoside at its C-13 hydroxyl group or a catalytically active portion thereof. In one aspect, the nucleic acid is an isolated nucleic acid. In one aspect, the nucleic acid is cDNA. In some embodiments, the encoded bifunctional polypeptide capable of glycosylating steviol or a steviol glycoside at its C-19 carboxyl group and glycosylating steviol or a steviol glycoside at its C-13 hydroxyl group or the catalytically active portion thereof comprises a polypeptide capable of glycosylating steviol or a steviol glycoside at its C-19 carboxyl group (e.g., a UGT74G1 polypeptide, e.g., a polypeptide having the amino acid sequence set forth in SEQ ID NO:4) and a polypeptide capable of glycosylating steviol or a steviol glycoside at its C-13 hydroxyl group (e.g., a UGT85C2 polypeptide, e.g., a polypeptide having the amino acid sequence set forth in SEQ ID NO:7) joined through a linker. In some embodiments, the linker may be the amino acid sequence “KLVK.” In some embodiments, the linker may the amino acid sequence “EGKSSGSGSESKST” (SEQ ID NO:151). In some embodiments, the linker is the amino acid sequence RASSTKLVK″ (SEQ ID NO:150). In some embodiments, the linker is the amino acid sequence “GGGGS.” In some embodiments, the linker is two repeats of the amino acid sequence “GGGGS” “GGGGSGGGGS”). In some embodiments, the linker is three repeats of the amino acid sequence “GGGGS.” In some embodiments, the linker is a direct bond (i.e., between the C-terminal of a first polypeptide and the N-terminal of a second polypeptide). In some embodiments, the encoded bifunctional polypeptide capable of glycosylating steviol or a steviol glycoside at its C-19 carboxyl group and glycosylating steviol or a steviol glycoside at its C-13 hydroxyl group or the catalytically active portion thereof comprises a polypeptide capable of glycosylating steviol or a steviol glycoside at its C-19 carboxyl group (e.g., a UGT74G1 polypeptide, e.g., a polypeptide having the amino acid sequence set forth in SEQ ID NO:4), joined at its C-terminal to the N-terminal of a polypeptide capable of glycosylating steviol or a steviol glycoside at its C-13 hydroxyl group (e.g., a UGT85C2 polypeptide, e.g., a polypeptide having the amino acid sequence set forth in SEQ ID NO:7). In some embodiments, the encoded bifunctional polypeptide capable of glycosylating steviol or a steviol glycoside at its C-19 carboxyl group and glycosylating steviol or a steviol glycoside at its C-13 hydroxyl group or the catalytically active portion thereof comprises a polypeptide capable of glycosylating steviol or a steviol glycoside at its C-13 hydroxyl group (e.g., a UGT85C2 polypeptide, e.g., a polypeptide having the amino acid sequence set forth in SEQ ID NO:7), joined at its C-terminal to the N-terminal of a polypeptide capable of glycosylating steviol or a steviol glycoside at its C-19 carboxyl group (e.g., a UGT74G1 polypeptide, e.g., a polypeptide having the amino acid sequence set forth in SEQ ID NO:4). In some embodiments, the encoded bifunctional polypeptide capable of glycosylating steviol or a steviol glycoside at its C-19 carboxyl group and glycosylating steviol or a steviol glycoside at its C-13 hydroxyl group or the catalytically active portion thereof comprises a polypeptide having the amino acid sequence set forth in SEQ ID NO:132, SEQ ID NO:134, SEQ ID NO:136, SEQ ID NO:138, SEQ ID NO:140, or SEQ ID NO:142, SEQ ID NO:144, SEQ ID NO:146, or SEQ ID NO:148. In some embodiments, the encoded bifunctional polypeptide capable of glycosylating steviol or a steviol glycoside at its C-19 carboxyl group and glycosylating steviol or a steviol glycoside at its C-13 hydroxyl group or the catalytically active portion thereof further comprises a tag, e.g., a tag having the amino acid sequence set forth in SEQ ID NO:152, SEQ ID NO:153, SEQ ID NO:154, or SEQ ID NO:155.

[0401] One aspect of the disclosure is a polypeptide capable of glycosylating steviol or a steviol glycoside at its C-19 carboxyl group or a catalytically active portion thereof. In one aspect, the polypeptide is a purified polypeptide. In some embodiments, the polypeptide capable of glycosylating steviol or a steviol glycoside at its C-19 carboxyl group or the catalytically active portion thereof comprises a polypeptide having the amino acid sequence set forth in SEQ ID NO:4, and further having at least one amino acid substitution corresponding to residues 79, 80, 81, 83, 184, 260, 286, or 377 of SEQ ID NO:4. In some embodiments, the polypeptide capable of glycosylating steviol or a steviol glycoside at its C-19 carboxyl group or the catalytically active portion thereof comprises a polypeptide having the amino acid sequence set forth in SEQ ID NO:4, and further having at least one amino acid substitution corresponding to residues 68, 69, 70, 71, 72, 73, 74, 75, 76, 77, 78, 79, 80, 81, 82, or 83 of SEQ ID NO:4. In some embodiments, the polypeptide capable of glycosylating steviol or a steviol glycoside at its C-19 carboxyl group or the catalytically active portion thereof comprises a polypeptide having the amino acid sequence set forth in SEQ ID NO:4, and further having a M79V, M79E, S80C, A81W, E83K, H184V, H184T N260T, K286C, K286E, K286N, K286T, and/or S377Q substitution corresponding to SEQ ID NO:4. In some embodiments, the polypeptide capable of glycosylating steviol or a steviol glycoside at its C-19 carboxyl group or the catalytically active portion thereof comprises a polypeptide having the amino acid sequence set forth in SEQ ID NO:4, and further having a K286C substitution corresponding to SEQ ID NO:4 SEQ ID NO:118); a M79V substitution corresponding to SEQ ID NO:4 SEQ ID NO:120); a S377Q substitution corresponding to SEQ ID NO:4 SEQ ID NO:122); a S800 substitution corresponding to SEQ ID NO:4 SEQ ID NO:124); a N260T and a K286C substitution corresponding to SEQ ID NO:4 SEQ ID NO:126); a H184V substitution corresponding to SEQ ID NO:4 SEQ ID NO:128); a A81W and a E83K substitution corresponding to SEQ ID NO:4 SEQ ID NO:130); a A81W substitution corresponding to SEQ ID NO:4 SEQ ID NO:161); a H184T substitution corresponding to SEQ ID NO:4 SEQ ID NO:163); a K286N substitution corresponding to SEQ ID NO:4 SEQ ID NO:165); a M79E substitution corresponding to SEQ ID NO:4 SEQ ID NO:167); or a K286T substitution corresponding to SEQ ID NO:4 SEQ ID NO:169). In some embodiments, the polypeptide capable of glycosylating steviol or a steviol glycoside at its C-19 carboxyl group or the catalytically active portion thereof further comprises a tag, e.g., a tag having the amino acid sequence set forth in SEQ ID NO:152, SEQ ID NO:153, SEQ ID NO:154, or SEQ ID NO:155.

[0402] Another aspect of the disclosure is a tagged polypeptide capable of glycosylating steviol or a steviol glycoside at its C-19 carboxyl group or a catalytically active portion thereof. In one aspect, the polypeptide is a purified polypeptide. In some embodiments, the tagged polypeptide capable of glycosylating steviol or a steviol glycoside at its C-19 carboxyl group or the catalytically active portion thereof comprises a polypeptide capable of glycosylating steviol or a steviol glycoside at its C-19 carboxyl group (e.g., a UGT74G1 polypeptide, e.g., a polypeptide having the amino acid sequence set forth in SEQ ID NO:4) and a tag (e.g., a tag having the amino acid sequence set forth in SEQ ID NO:152, SEQ ID NO:153, SEQ ID NO:154, or SEQ ID NO:155), joined through a linker. In some embodiments, the linker may be the amino acid sequence “KLVK.” In some embodiments, the linker may the amino acid sequence “EGKSSGSGSESKST” (SEQ ID NO:151). In some embodiments, the linker is the amino acid sequence RASSTKLVK″ (SEQ ID NO:150). In some embodiments, the linker is the amino acid sequence “GGGGS.” In some embodiments, the linker is two repeats of the amino acid sequence “GGGGS” “GGGGSGGGGS”). In some embodiments, the linker is three repeats of the amino acid sequence “GGGGS.” In some embodiments, the linker is a direct bond (i.e., between the C-terminal of a first polypeptide and the N-terminal of a second polypeptide). In some embodiments, the tagged polypeptide capable of glycosylating steviol or a steviol glycoside at its C-19 carboxyl group or the catalytically active portion thereof comprises a polypeptide capable of glycosylating steviol or a steviol glycoside at its C-19 carboxyl group (e.g., a UGT74G1 polypeptide, e.g., a polypeptide having the amino acid sequence set forth in SEQ ID NO:4) joined at its N-terminal to the C-terminal of a tag (e.g., a tag having the amino acid sequence set forth in SEQ ID NO:152, SEQ ID NO:153, SEQ ID NO:154, or SEQ ID NO:155). In some embodiments, the tagged polypeptide capable of glycosylating steviol or a steviol glycoside at its C-19 carboxyl group or the catalytically active portion thereof comprises a polypeptide having the amino acid sequence set forth in SEQ ID NO: 174, SEQ ID NO:176, SEQ ID NO:178, or SEQ ID NO:180.

[0403] Another aspect of the disclosure is a bifunctional polypeptide capable of glycosylating steviol or a steviol glycoside at its C-19 carboxyl group and glycosylating steviol or a steviol glycoside at its C-13 hydroxyl group or a catalytically active portion thereof. In one aspect, the polypeptide is a purified polypeptide. In some embodiments, the bifunctional polypeptide capable of glycosylating steviol or a steviol glycoside at its C-19 carboxyl group and glycosylating steviol or a steviol glycoside at its C-13 hydroxyl group or the catalytically active portion thereof comprises a polypeptide capable of glycosylating steviol or a steviol glycoside at its C-19 carboxyl group (e.g., a UGT74G1 polypeptide, e.g., a polypeptide having the amino acid sequence set forth in SEQ ID NO:4) and a polypeptide capable of glycosylating steviol or a steviol glycoside at its C-13 hydroxyl group (e.g., a UGT85C2 polypeptide, e.g., a polypeptide having the amino acid sequence set forth in SEQ ID NO:7) joined through a linker. In some embodiments, the linker may be the amino acid sequence “KLVK.” In some embodiments, the linker may the amino acid sequence “EGKSSGSGSESKST” (SEQ ID NO:151). In some embodiments, the linker is the amino acid sequence RASSTKLVK″ (SEQ ID NO:150). In some embodiments, the linker is the amino acid sequence “GGGGS.” In some embodiments, the linker is two repeats of the amino acid sequence “GGGGS” “GGGGSGGGGS”). In some embodiments, the linker is three repeats of the amino acid sequence “GGGGS.” In some embodiments, the linker is a direct bond (i.e., between the C-terminal of a first polypeptide and the N-terminal of a second polypeptide). In some embodiments, the bifunctional polypeptide capable of glycosylating steviol or a steviol glycoside at its C-19 carboxyl group and glycosylating steviol or a steviol glycoside at its C-13 hydroxyl group or the catalytically active portion thereof comprises a polypeptide capable of glycosylating steviol or a steviol glycoside at its C-19 carboxyl group (e.g., a UGT74G1 polypeptide, e.g., a polypeptide having the amino acid sequence set forth in SEQ ID NO:4), joined at its C-terminal to the N-terminal of a polypeptide capable of glycosylating steviol or a steviol glycoside at its C-13 hydroxyl group (e.g., a UGT85C2 polypeptide, e.g., a polypeptide having the amino acid sequence set forth in SEQ ID NO:7). In some embodiments, the bifunctional polypeptide capable of glycosylating steviol or a steviol glycoside at its C-19 carboxyl group and glycosylating steviol or a steviol glycoside at its C-13 hydroxyl group or the catalytically active portion thereof comprises a polypeptide capable of glycosylating steviol or a steviol glycoside at its C-13 hydroxyl group (e.g., a UGT85C2 polypeptide, e.g., a polypeptide having the amino acid sequence set forth in SEQ ID NO:7), joined at its C-terminal to the N-terminal of a polypeptide capable of glycosylating steviol or a steviol glycoside at its C-19 carboxyl group (e.g., a UGT74G1 polypeptide, e.g., a polypeptide having the amino acid sequence set forth in SEQ ID NO:4). In some embodiments, the bifunctional polypeptide capable of glycosylating steviol or a steviol glycoside at its C-19 carboxyl group and glycosylating steviol or a steviol glycoside at its C-13 hydroxyl group or the catalytically active portion thereof comprises a polypeptide having the amino acid sequence set forth in SEQ ID NO:132, SEQ ID NO:134, SEQ ID NO:136, SEQ ID NO:138, SEQ ID NO:140, or SEQ ID NO:142, SEQ ID NO:144, SEQ ID NO:146, or SEQ ID NO:148. In some embodiments, the bifunctional polypeptide capable of glycosylating steviol or a steviol glycoside at its C-19 carboxyl group and glycosylating steviol or a steviol glycoside at its C-13 hydroxyl group or the catalytically active portion thereof further comprises a tag, e.g., a tag having the amino acid sequence set forth in SEQ ID NO:152, SEQ ID NO:153, SEQ ID NO:154, or SEQ ID NO:155.

### Host Microorganisms

[0404] Recombinant hosts can be used to express polypeptides for the producing steviol glycosides, including mammalian, insect, plant, and algal cells. A number of prokaryotes and eukaryotes are also suitable for use in constructing the recombinant microorganisms described herein, e.g., gram-negative bacteria, yeast, and fungi. A species and strain selected for use as a steviol glycoside production strain is first analyzed to determine which production genes are endogenous to the strain and which genes are not present. Genes for which an endogenous counterpart is not present in the strain are advantageously assembled in one or more recombinant constructs, which are then transformed into the strain in order to supply the missing function(s).

[0405] Typically, the recombinant microorganism is grown in a fermenter at a temperature(s) for a period of time, wherein the temperature and period of time facilitate production of a steviol glycoside. The constructed and genetically engineered microorganisms provided by the invention can be cultivated using conventional fermentation processes, including, inter alia, chemostat, batch, fed-batch cultivations, semi-continuous fermentations such as draw and fill, continuous perfusion fermentation, and continuous perfusion cell culture. Depending on the particular microorganism used in the method, other recombinant genes such as isopentenyl biosynthesis genes and terpene synthase and cyclase genes may also be present and expressed. Levels of substrates and intermediates, e.g., isopentenyl diphosphate, dimethylallyl diphosphate, GGPP, ent-Kaurene and ent-kaurenoic acid, can be determined by extracting samples from culture media for analysis according to published methods.

[0406] Carbon sources of use in the instant method include any molecule that can be metabolized by the recombinant host cell to facilitate growth and/or production of the steviol glycosides. Examples of suitable carbon sources include, but are not limited to, sucrose (e.g., as found in molasses), fructose, xylose, ethanol, glycerol, glucose, cellulose, starch, cellobiose or other glucose-comprising polymer. In embodiments employing yeast as a host, for example, carbons sources such as sucrose, fructose, xylose, ethanol, glycerol, and glucose are suitable. The carbon source can be provided to the host organism throughout the cultivation period or alternatively, the organism can be grown for a period of time in the presence of another energy source, e.g., protein, and then provided with a source of carbon only during the fed-batch phase.

[0407] After the recombinant microorganism has been grown in culture for the period of time, wherein the temperature and period of time facilitate production of a steviol glycoside, steviol and/or one or more steviol glycosides can then be recovered from the culture using various techniques known in the art. In some embodiments, a permeabilizing agent can be added to aid the feedstock entering into the host and product getting out. For example, a crude lysate of the cultured microorganism can be centrifuged to obtain a supernatant. The resulting supernatant can then be applied to a chromatography column, e.g., a C-18 column, and washed with water to remove hydrophilic compounds, followed by elution of the compound(s) of interest with a solvent such as methanol. The compound(s) can then be further purified by preparative HPLC. See also, WO 2009/140394.

[0408] It will be appreciated that the various genes and modules discussed herein can be present in two or more recombinant hosts rather than a single host. When a plurality of recombinant hosts is used, they can be grown in a mixed culture to accumulate steviol and/or steviol glycosides.

[0409] Alternatively, the two or more hosts each can be grown in a separate culture medium and the product of the first culture medium, e.g., steviol, can be introduced into second culture medium to be converted into a subsequent intermediate, or into an end product such as, for example, RebA. The product produced by the second, or final host is then recovered. It will also be appreciated that in some embodiments, a recombinant host is grown using nutrient sources other than a culture medium and utilizing a system other than a fermenter.

[0410] Exemplary prokaryotic and eukaryotic species are described in more detail below. However, it will be appreciated that other species can be suitable. For example, suitable species can be in a genus such as Agaricus, Aspergillus, Bacillus, Candida, Corynebacterium, Eremothecium, Escherichia, Fusarium/Gibberella, Kluyveromyces, Laetiporus, Lentinus, Phaffia, Phanerochaete, Pichia, Physcomitrella, Rhodoturula, Saccharomyces, Schizosaccharomyces, Sphaceloma, Xanthophyllomyces or Yarrowia. Exemplary species from such genera include Lentinus tigrinus, Laetiporus sulphureus, Phanerochaete chrysosporium, Pichia pastoris, Cyberlindnera jadinii, Physcomitrella patens, Rhodoturula glutinis, Rhodoturula mucilaginosa, Phaffia rhodozyma, Xanthophyllomyces dendrorhous, Fusarium fujikuroi/Gibberella fujikuroi, Candida utilis, Candida glabrata, Candida albicans, and Yarrowia lipolytica.

[0411] In some embodiments, a microorganism can be a prokaryote such as Escherichia bacteria cells, for example, Escherichia coli cells; Lactobacillus bacteria cells; Lactococcus bacteria cells; Comebacterium bacteria cells; Acetobacter bacteria cells; Acinetobacter bacteria cells; or Pseudomonas bacterial cells.

[0412] In some embodiments, a microorganism can be an Ascomycete such as Gibberella fujikuroi, Kluyveromyces lactis, Schizosaccharomyces pombe, Aspergillus niger, Yarrowia lipolytica, Ashbya gossypii, or S. cerevisiae.

[0413] In some embodiments, a microorganism can be an algal cell such as Blakeslea trispora, Dunaliella salina, Haematococcus pluvialis, Chlorella sp., Undaria pinnatifida, Sargassum, Laminaria japonica, Scenedesmus almeriensis species.

[0414] In some embodiments, a microorganism can be a cyanobacterial cell such as Blakeslea trispora, Dunaliella salina, Haematococcus pluvialis, Chlorella sp., Undaria pinnatifida, Sargassum, Laminaria japonica, Scenedesmus almeriensis.

### Saccharomyces spp.

[0415] Saccharomyces is a widely used chassis organism in synthetic biology, and can be used as the recombinant microorganism platform. For example, there are libraries of mutants, plasmids, detailed computer models of metabolism and other information available for S. cerevisiae, allowing for rational design of various modules to enhance product yield. Methods are known for making recombinant microorganisms.

### Aspergillus spp.

[0416] Aspergillus species such as A. oryzae, A. niger and A. sojae are widely used microorganisms in food production and can also be used as the recombinant microorganism platform. Nucleotide sequences are available for genomes of A. nidulans, A. fumigatus, A. oryzae, A. clavatus, A. flavus, A. niger, and A. terreus, allowing rational design and modification of endogenous pathways to enhance flux and increase product yield. Metabolic models have been developed for Aspergillus, as well as transcriptomic studies and proteomics studies. A. niger is cultured for the industrial production of a number of food ingredients such as citric acid and gluconic acid, and thus species such as A. niger are generally suitable for producing steviol glycosides.

E. coli

[0417] E. coli, another widely used platform organism in synthetic biology, can also be used as the recombinant microorganism platform. Similar to Saccharomyces, there are libraries of mutants, plasmids, detailed computer models of metabolism and other information available for E. coli, allowing for rational design of various modules to enhance product yield. Methods similar to those described above for Saccharomyces can be used to make recombinant E. coli microorganisms.

### Agaricus, Gibberella, and Phanerochaete spp.

[0418] Agaricus, Gibberella, and Phanerochaete spp. can be useful because they are known to produce large amounts of isoprenoids in culture. Thus, the terpene precursors for producing large amounts of steviol glycosides are already produced by endogenous genes. Thus, modules comprising recombinant genes for steviol glycoside biosynthesis polypeptides can be introduced into species from such genera without the necessity of introducing mevalonate or MEP pathway genes.

Arxula adeninivorans (Blastobotrys adeninivorans)

[0419] Arxula adeninivorans is dimorphic yeast (it grows as budding yeast like the baker's yeast up to a temperature of 42° C., above this threshold it grows in a filamentous form) with unusual biochemical characteristics. It can grow on a wide range of substrates and can assimilate nitrate. It has successfully been applied to the generation of strains that can produce natural plastics or the development of a biosensor for estrogens in environmental samples.

Yarrowia lipolytica

[0420] Yarrowia lipolytica is dimorphic yeast (see Arxula adeninivorans) and belongs to the family Hemiascomycetes. The entire genome of Yarrowia lipolytica is known. Yarrowia species is aerobic and considered to be non-pathogenic. Yarrowia is efficient in using hydrophobic substrates (e.g. alkanes, fatty acids, oils) and can grow on sugars. It has a high potential for industrial applications and is an oleaginous microorgamism. Yarrowia lipolyptica can accumulate lipid content to approximately 40% of its dry cell weight and is a model organism for lipid accumulation and remobilization. See e.g., Nicaud, 2012, Yeast 29(10):409-18; Beopoulos et al., 2009, Biochimie 91(6):692-6; Bankar et al., 2009, Appl Microbiol Biotechnol. 84(5):847-65.

### Rhodotorula sp.

[0421] Rhodotorula is unicellular, pigmented yeast. The oleaginous red yeast, Rhodotorula glutinis, has been shown to produce lipids and carotenoids from crude glycerol (Saenge et al., 2011, Process Biochemistry 46(1):210-8). Rhodotorula toruloides strains have been shown to be an efficient fed-batch fermentation system for improved biomass and lipid productivity (Li et al., 2007, Enzyme and Microbial Technology 41:312-7).

Rhodosporidium toruloides

[0422] Rhodosporidium toruloides is oleaginous yeast and useful for engineering lipid-production pathways (See e.g. Zhu et al., 2013, Nature Commun. 3:1112; Ageitos et al., 2011, Applied Microbiology and Biotechnology 90(4):1219-27).

Candida boidinii

[0423] Candida boidinii is methylotrophic yeast (it can grow on methanol). Like other methylotrophic species such as Hansenula polymorpha and Pichia pastoris, it provides an excellent platform for producing heterologous proteins. Yields in a multigram range of a secreted foreign protein have been reported. A computational method, IPRO, recently predicted mutations that experimentally switched the cofactor specificity of Candida boidinii xylose reductase from NADPH to NADH. See, e.g., Mattanovich et al., 2012, Methods Mol Biol. 824:329-58; Khoury et al., 2009, Protein Sci. 18(10):2125-38.

Hansenula polymorpha (Pichia angusta)

[0424] Hansenula polymorpha is methylotrophic yeast (see Candida boidinii). It can furthermore grow on a wide range of other substrates; it is thermo-tolerant and can assimilate nitrate (see also Kluyveromyces lactis). It has been applied to producing hepatitis B vaccines, insulin and interferon alpha-2a for the treatment of hepatitis C, furthermore to a range of technical enzymes. See, e.g., Xu et al., 2014, Virol Sin. 29(6):403-9.

Kluyveromyces lactis

[0425] Kluyveromyces lactis is yeast regularly applied to the production of kefir. It can grow on several sugars, most importantly on lactose which is present in milk and whey. It has successfully been applied among others for producing chymosin (an enzyme that is usually present in the stomach of calves) for producing cheese. Production takes place in fermenters on a 40,000 L scale. See, e.g., van Ooyen et al., 2006, FEMS Yeast Res. 6(3):381-92.

Pichia pastoris

[0426] Pichia pastoris is methylotrophic yeast (see Candida boidinii and Hansenula polymorpha). It provides an efficient platform for producing foreign proteins. Platform elements are available as a kit and it is worldwide used in academia for producing proteins. Strains have been engineered that can produce complex human N-glycan (yeast glycans are similar but not identical to those found in humans). See, e.g., Piirainen et al., 2014, N Biotechnol. 31(6):532-7.

### Physcomitrella spp.

[0427] Physcomitrella mosses, when grown in suspension culture, have characteristics similar to yeast or other fungal cultures. This genera can be used for producing plant secondary metabolites, which can be difficult to produce in other types of cells.

[0428] It will be appreciated that the recombinant host cell disclosed herein can comprise a plant cell, comprising a plant cell that is grown in a plant, a mammalian cell, an insect cell, a fungal cell, comprising a yeast cell, wherein the yeast cell is a cell from Saccharomyces cerevisiae, Schizosaccharomyces pombe, Yarrowia lipolytica, Candida glabrata, Ashbya gossypii, Cyberlindnera jadinii, Pichia pastoris, Kluyveromyces lactis, Hansenula polymorpha, Candida boidinii, Arxula adeninivorans, Xanthophyllomyces dendrorhous, or Candida albicans species or is a Saccharomycete or is a Saccharomyces cerevisiae cell, an algal cell or a bacterial cell, comprising Escherichia cell, Lactobacillus cell, Lactococcus cell, Cornebacterium cell, Acetobacter cell, Acinetobacter cell, or Pseudomonas cell.

### Steviol Glycoside Compositions

[0429] Steviol glycosides do not necessarily have equivalent performance in different food systems. It is therefore desirable to have the ability to direct the synthesis to steviol glycoside compositions of choice. Recombinant hosts described herein can produce compositions that are selectively enriched for specific steviol glycosides (e.g., RebD or RebM) and have a consistent taste profile. As used herein, the term “enriched” is used to describe a steviol glycoside composition with an increased proportion of a particular steviol glycoside, compared to a steviol glycoside composition (extract) from a stevia plant. Thus, the recombinant hosts described herein can facilitate the production of compositions that are tailored to meet the sweetening profile desired for a given food product and that have a proportion of each steviol glycoside that is consistent from batch to batch. In some embodiments, hosts described herein do not produce or produce a reduced amount of undesired plant by-products found in Stevia extracts. Thus, steviol glycoside compositions produced by the recombinant hosts described herein are distinguishable from compositions derived from Stevia plants.

[0430] The amount of an individual steviol glycoside (e.g., RebA, RebB, RebD, or RebM) accumulated can be from about 1 to about 7,000 mg/L, e.g., about 1 to about 10 mg/L, about 3 to about 10 mg/L, about 5 to about 20 mg/L, about 10 to about 50 mg/L, about 10 to about 100 mg/L, about 25 to about 500 mg/L, about 100 to about 1,500 mg/L, or about 200 to about 1,000 mg/L, at least about 1,000 mg/L, at least about 1,200 mg/L, at least about at least 1,400 mg/L, at least about 1,600 mg/L, at least about 1,800 mg/L, at least about 2,800 mg/L, or at least about 7,000 mg/L. In some aspects, the amount of an individual steviol glycoside can exceed 7,000 mg/L. The amount of a combination of steviol glycosides (e.g., RebA, RebB, RebD, or RebM) accumulated can be from about 1 mg/L to about 7,000 mg/L, e.g., about 200 to about 1,500, at least about 2,000 mg/L, at least about 3,000 mg/L, at least about 4,000 mg/L, at least about 5,000 mg/L, at least about 6,000 mg/L, or at least about 7,000 mg/L. In some aspects, the amount of a combination of steviol glycosides can exceed 7,000 mg/L. In general, longer culture times will lead to greater amounts of product. Thus, the recombinant microorganism can be cultured for from 1 day to 7 days, from 1 day to 5 days, from 3 days to 5 days, about 3 days, about 4 days, or about 5 days.

[0431] It will be appreciated that the various genes and modules discussed herein can be present in two or more recombinant microorganisms rather than a single microorganism. When a plurality of recombinant microorganisms is used, they can be grown in a mixed culture to produce steviol and/or steviol glycosides. For example, a first microorganism can comprise one or more biosynthesis genes for producing a steviol glycoside precursor, while a second microorganism comprises steviol glycoside biosynthesis genes. The product produced by the second, or final microorganism is then recovered. It will also be appreciated that in some embodiments, a recombinant microorganism is grown using nutrient sources other than a culture medium and utilizing a system other than a fermenter.

[0432] Alternatively, the two or more microorganisms each can be grown in a separate culture medium and the product of the first culture medium, e.g., steviol, can be introduced into second culture medium to be converted into a subsequent intermediate, or into an end product such as RebA. The product produced by the second, or final microorganism is then recovered. It will also be appreciated that in some embodiments, a recombinant microorganism is grown using nutrient sources other than a culture medium and utilizing a system other than a fermenter.

[0433] Steviol glycosides and compositions obtained by the methods disclosed herein can be used to make food products, dietary supplements and sweetener compositions. See, e.g., WO 2011/153378, WO 2013/022989, WO 2014/122227, and WO 2014/122328.

[0434] For example, substantially pure steviol or steviol glycoside such as RebM or RebD can be included in food products such as ice cream, carbonated beverages, fruit juices, yogurts, baked goods, chewing gums, hard and soft candies, and sauces. Substantially pure steviol or steviol glycoside can also be included in non-food products such as pharmaceutical products, medicinal products, dietary supplements and nutritional supplements. Substantially pure steviol or steviol glycosides may also be included in animal feed products for both the agriculture industry and the companion animal industry. Alternatively, a mixture of steviol and/or steviol glycosides can be made by culturing recombinant microorganisms separately, each producing a specific steviol or steviol glycoside, recovering the steviol or steviol glycoside in substantially pure form from each microorganism and then combining the compounds to obtain a mixture comprising each compound in the desired proportion. The recombinant microorganisms described herein permit more precise and consistent mixtures to be obtained compared to current Stevia products.

[0435] In another alternative, a substantially pure steviol or steviol glycoside can be incorporated into a food product along with other sweeteners, e.g. saccharin, dextrose, sucrose, fructose, erythritol, aspartame, sucralose, monatin, or acesulfame potassium. The weight ratio of steviol or steviol glycoside relative to other sweeteners can be varied as desired to achieve a satisfactory taste in the final food product. See, e.g., U.S. 2007/0128311. In some embodiments, the steviol or steviol glycoside may be provided with a flavor (e.g., citrus) as a flavor modulator.

[0436] Compositions produced by a recombinant microorganism described herein can be incorporated into food products. For example, a steviol glycoside composition produced by a recombinant microorganism can be incorporated into a food product in an amount ranging from about 20 mg steviol glycoside/kg food product to about 1800 mg steviol glycoside/kg food product on a dry weight basis, depending on the type of steviol glycoside and food product. For example, a steviol glycoside composition produced by a recombinant microorganism can be incorporated into a dessert, cold confectionary (e.g., ice cream), dairy product (e.g., yogurt), or beverage (e.g., a carbonated beverage) such that the food product has a maximum of 500 mg steviol glycoside/kg food on a dry weight basis. A steviol glycoside composition produced by a recombinant microorganism can be incorporated into a baked good (e.g., a biscuit) such that the food product has a maximum of 300 mg steviol glycoside/kg food on a dry weight basis. A steviol glycoside composition produced by a recombinant microorganism can be incorporated into a sauce (e.g., chocolate syrup) or vegetable product (e.g., pickles) such that the food product has a maximum of 1000 mg steviol glycoside/kg food on a dry weight basis. A steviol glycoside composition produced by a recombinant microorganism can be incorporated into bread such that the food product has a maximum of 160 mg steviol glycoside/kg food on a dry weight basis. A steviol glycoside composition produced by a recombinant microorganism, plant, or plant cell can be incorporated into a hard or soft candy such that the food product has a maximum of 1600 mg steviol glycoside/kg food on a dry weight basis. A steviol glycoside composition produced by a recombinant microorganism, plant, or plant cell can be incorporated into a processed fruit product (e.g., fruit juices, fruit filling, jams, and jellies) such that the food product has a maximum of 1000 mg steviol glycoside/kg food on a dry weight basis. In some embodiments, a steviol glycoside composition produced herein is a component of a pharmaceutical composition. See, e.g., Steviol Glycosides Chemical and Technical Assessment 69th JECFA, 2007, prepared by Harriet Wallin, Food Agric. Org.; EFSA Panel on Food Additives and Nutrient Sources added to Food (ANS), “Scientific Opinion on the safety of steviol glycosides for the proposed uses as a food additive,” 2010, EFSA Journal 8(4):1537; U.S. Food and Drug Administration GRAS Notice 323; U.S Food and Drug Administration GRAS Notice 329; WO 2011/037959; WO 2010/146463; WO 2011/046423; and WO 2011/056834.

[0437] For example, such a steviol glycoside composition can have from 90-99 weight % RebA and an undetectable amount of stevia plant-derived contaminants, and be incorporated into a food product at from 25-1600 mg/kg, e.g., 100-500 mg/kg, 25-100 mg/kg, 250-1000 mg/kg, 50-500 mg/kg or 500-1000 mg/kg on a dry weight basis.

[0438] Such a steviol glycoside composition can be a RebB-enriched composition having greater than 3 weight % RebB and be incorporated into the food product such that the amount of RebB in the product is from 25-1600 mg/kg, e.g., 100-500 mg/kg, 25-100 mg/kg, 250-1000 mg/kg, 50-500 mg/kg or 500-1000 mg/kg on a dry weight basis. Typically, the RebB-enriched composition has an undetectable amount of stevia plant-derived contaminants.

[0439] Such a steviol glycoside composition can be a RebD-enriched composition having greater than 3 weight % RebD and be incorporated into the food product such that the amount of RebD in the product is from 25-1600 mg/kg, e.g., 100-500 mg/kg, 25-100 mg/kg, 250-1000 mg/kg, 50-500 mg/kg or 500-1000 mg/kg on a dry weight basis. Typically, the RebD-enriched composition has an undetectable amount of stevia plant-derived contaminants.

[0440] Such a steviol glycoside composition can be a RebE-enriched composition having greater than 3 weight % RebE and be incorporated into the food product such that the amount of RebE in the product is from 25-1600 mg/kg, e.g., 100-500 mg/kg, 25-100 mg/kg, 250-1000 mg/kg, 50-500 mg/kg or 500-1000 mg/kg on a dry weight basis. Typically, the RebE-enriched composition has an undetectable amount of stevia plant-derived contaminants.

[0441] Such a steviol glycoside composition can be a RebM-enriched composition having greater than 3 weight % RebM and be incorporated into the food product such that the amount of RebM in the product is from 25-1600 mg/kg, e.g., 100-500 mg/kg, 25-100 mg/kg, 250-1000 mg/kg, 50-500 mg/kg or 500-1000 mg/kg on a dry weight basis. Typically, the RebM-enriched composition has an undetectable amount of stevia plant-derived contaminants.

[0442] In some embodiments, a substantially pure steviol or steviol glycoside is incorporated into a tabletop sweetener or “cup-for-cup” product. Such products typically are diluted to the appropriate sweetness level with one or more bulking agents, e.g., maltodextrins, known to those skilled in the art. Steviol glycoside compositions enriched for RebA, RebB, RebD, RebE, or RebM, can be package in a sachet, for example, at from 10,000 to 30,000 mg steviol glycoside/kg product on a dry weight basis, for tabletop use. In some embodiments, a steviol glycoside produced in vitro, in vivo, or by whole cell bioconversion

[0443] The invention will be further described in the following examples, which do not limit the scope of the invention described in the claims.

### EXAMPLES

### Example 1

### LC-MS Analytical Procedures

[0444] LC-MS analyses were performed on Waters ACQUITY UPLC® (Waters Corporation) with a Waters ACQUITY UPLC® BEH C18 column (2.1×50 mm, 1.7 μm particles, 130 Å pore size) equipped with a pre-column (2.1×5 mm, 1.7 μm particles, 130 Å pore size) coupled to a Waters ACQUITY TQD triple quadropole mass spectrometer with electrospray ionization (ESI) operated in negative ionization mode. Compound separation was achieved using a gradient of the two mobile phases: A (water with 0.1% formic acid) and B (MeCN with 0.1% formic acid) by increasing from 20% to 50% B between 0.3 to 2.0 min, increasing to 100% B at 2.01 min and holding 100% B for 0.6 min, and re-equilibrating for 0.6 min. The flow rate was 0.6 mL/min, and the column temperature was set at 55° C. Steviol glycosides were monitored using SIM (Single Ion Monitoring) and quantified by comparing against authentic standards. See Table 1 for m/z trace and retention time values of steviol glycosides detected.

TABLE 1
LC-MS Analytical Data for Glycosides of ent-kaurenoic acid,
ent-kaurenol, and Steviol.

| | | RT | |
|---|---|---|---|
| Compound | MS Trace | (min) | Table(s) |
| steviol + 6Glc (isomer 1) | 1289.53 | 0.87 | 5, 9, 13, 17 |
| [also referred to as compound 6.1] | | | |
| steviol + 7Glc (isomer 2) | 1451.581 | 0.94 | 5, 9, 13, 17 |
| [also referred to as compound 7.2] | | | |
| steviol + 6Glc (#23) | 1289.53 | 0.97 | 5, 9, 13, 17 |
| (also referred to as compound 6.23) | | | |
| RebE | 965.42 | 1.06 | 4, 8, 12, 16 |
| RebD | 1127.48 | 1.08 | 4, 8, 12, 16 |
| RebM | 1289.53 | 1.15 | 4, 8, 12, 16 |
| steviol + 7Glc (isomer 5) | 1451.581 | 1.09 | 5, 9, 13, 14 |
| (also referred to as compound 7.5) | | | |
| steviol + 4Glc (#26) | 965.42 | 1.21 | 5, 9, 13, 14 |
| (also referred to as compound 4.26) | | | |
| steviol + 5Glc (#24) | 1127.48 | 1.18 | 5, 9, 13, 14 |
| (also referred to as compound 5.24) | | | |
| steviol + 5Glc (#25) | 1127.48 | 1.40 | 5, 9, 13, 14 |
| (also referred to as compound 5.25) | | | |
| RebA | 965.42 | 1.43 | 4, 8, 12, 16 |
| 1,2-stevioside | 803.37 | 1.43 | 5, 9, 13, 14 |
| steviol + 4Glc (#33) | 965.42 | 1.49 | 5, 9, 13, 14 |
| (also referred to as compound 4.33) | | | |
| 1,3-stevioside (RebG) | 803.37 | 1.60 | 5, 9, 13, 14 |
| rubusoside | 641.32 | 1.67 | 4, 8, 12, 16 |
| RebB | 803.37 | 1.76 | 4, 8, 12, 16 |
| steviol-1,2-bioside | 641.32 | 1.80 | 4, 8, 12, 16 |
| steviol-1,3-bioside | 641.32 | 1.95 | 5, 9, 13, 14 |
| 19-SMG | 525.27 | 1.98 | 5, 9, 13, 14 |
| 13-SMG | 479.26 | 2.04 | 4, 8, 12, 16 |
| ent-kaurenoic acid + 3Glc (isomer 1) | 787.37 | 2.16 | 6, 10, 14, 18 |
| (also referred to as compound KA3.1) | | | |
| ent-kaurenoic acid + 3Glc (isomer 2) | 787.37 | 2.28 | 6, 10, 14, 18 |
| (also referred to as compound KA3.2) | | | |
| ent-kaurenol + 3Glc (isomer 1) | 773.4 | 2.36 | 6, 10 |
| co-eluted with ent-kaurenol + 3Glc (#6) | | | |
| (also referred to as compounds | | | |
| KL3.1 and KL3.6) | | | |
| ent-kaurenoic acid + 2Glc (#7) | 625.32 | 2.35 | 6, 10, 14, 18 |
| (also referred to as compound KA2.7) | | | |
| ent-kaurenol + 2Glc (#8) | 611.34 | 2.38 | 10 |
| (also referred to as compound KL2.8) | | | |
| steviol | 317.21 | 2.39 | |

### Example 2

### Strain Engineering

[0445] Steviol glycoside-producing S. cerevisiae strains were constructed as described in WO 2011/153378, WO 2013/022989, WO 2014/122227, and WO 2014/122328, each of which is incorporated by reference in their entirety. For example, yeast strains comprising one or more copies of: a recombinant gene encoding a GGPPS polypeptide (SEQ ID NO:19, SEQ ID NO:20), a recombinant gene encoding a truncated CDPS polypeptide (SEQ ID NO:39, SEQ ID NO:40), a recombinant gene encoding an KS polypeptide (SEQ ID NO:51, SEQ ID NO:52), a recombinant gene encoding a recombinant KO polypeptide (SEQ ID NO:59, SEQ ID NO:60), a recombinant gene encoding an ATR2 polypeptide (SEQ ID NO:91, SEQ ID NO:92), a recombinant gene encoding an EUGT11 polypeptide (SEQ ID NO:14/SEQ ID NO:15, SEQ ID NO:16), a recombinant gene encoding an KAH polypeptide (SEQ ID NO:93, SEQ ID NO:94), a recombinant gene encoding an CPR8 polypeptide (SEQ ID NO:85, SEQ ID NO:86), a recombinant gene encoding an UGT85C2 polypeptide (SEQ ID NO:5/SEQ ID NO:6/SEQ ID NO:149, SEQ ID NO:7) or a UGT85C2 variant (or functional homolog) of SEQ ID NO:7, a recombinant gene encoding an UGT74G1 polypeptide (SEQ ID NO:3, SEQ ID NO:4) of a UGT74G1 variant (or functional homolog) of SEQ ID NO:4, a recombinant gene encoding an UGT76G1 polypeptide (SEQ ID NO:8, SEQ ID NO:9) or a UGT76G1 variant (or functional homolog) of SEQ ID NO:9, and a recombinant gene encoding an UGT91D2e polypeptide (SEQ ID NO:10, SEQ ID NO:11) and/or a UGT91D2e variant (or functional homolog) of SEQ ID NO:11 such as a UGT91D2e-b (SEQ ID NO:12, SEQ ID NO:13) polypeptide were engineered to accumulate steviol glycosides.

### Example 3

### Modulation of Substrate-Specificity of UGT74G1

[0446] UGT74G1 is expressed in the Stevia plant and catalyzes, among other reactions, the conversion of 13-SMG to rubusoside. Because UGT74G1 demonstrates substrate promiscuity and 13-SMG accumulates in steviol glycoside-producing hosts, variants for catalyzing 13-SMG to rubusoside were identified.

[0447] A homology model of UGT74G1 was generated from the crystal structure of UGT78K6 (PDB:2C1Z), using Rebaudioside B (RebB) as a substrate for docking analysis. RebB was chosen because it is the largest steviol glycoside that UGT74G1 is known to have activity on. The homology model was generated using the modeling suite in the Molecular Operating Environment (MOE) software (Chemical Computing Group).

[0448] Twenty-seven amino acids were determined to be within 4.5 Å of RebB in the homology model. Results are shown in Table 2. A UGT74G1 site saturation library (SSL) screen of the 27 amino acids was prepared using GENEART™ (Thermo Fisher Scientific) in a GENEART™ codon optimized version of UGT74G1 (SEQ ID NO:1, SEQ ID NO:4). Histidine 23 (i.e., His23) is fully conserved and is believed to be catalytically active, and as such was not included in the site saturation library. 460 site saturated variants were expressed with a p416-GPD vector in a steviol glycoside-producing S. cerevisiae strain as described in Example 2, further engineered to disrupt expression of native UGT74G1 polypeptide, and incubated in 1 mL synthetic complete (SC) uracil dropout media at 30° C. for five days, shaking at 400 rpm. 50 μL of each culture was transferred into 50 μL DMSO, incubated at 80° C. for 10 minutes, and centrifuged at 3220 g for 5 minutes. 15 μL of the resulting supernatant was then transferred to 105 μL 50% DMSO for LC-MS analysis.

TABLE 2
UGT74G1 Residues Identified in Homology Model

| | Residue near |
|---|---|
| No. | Reb B |
| 1 | F18 |
| 2 | L20 |
| 3 | Q21 |
| 4 | H23 |
| 5 | M79 |
| 6 | S80 |
| 7 | A81 |
| 8 | G82 |
| 9 | E83 |
| 10 | Y85 |
| 11 | L86 |
| 12 | M119 |
| 13 | Q140 |
| 14 | Y148 |
| 15 | L179 |
| 16 | H184 |
| 17 | E185 |
| 18 | W191 |
| 19 | M194 |
| 20 | L195 |
| 21 | L284 |
| 22 | V285 |
| 23 | K286 |
| 24 | Q375 |
| 25 | F376 |
| 26 | S377 |
| 27 | D378 |

[0449] Seven candidates were selected from the SSL variants and sequenced (See, Table 3). These mutations impart an increase in viability to steviol glycoside-producing S. cerevisiae strains when such a mutated UGT74G1 is expressed (See, FIG. 3).

TABLE 3
Sequenced UGT74G1 Variants

| Name | Nucleotide Changes | Amino Acid Changes | SEQ ID NO |
|---|---|---|---|
| Var_1 | A856G | K286E | 2, 118 |
| Var_2 | A235G | M79V | 119, 120 |
| | G237T | | |
| Var_3 | T1129C | S377Q | 121, 122 |
| | C1130A | | |
| | T1131A | | |
| Var_4 | C239G | S80C | 123, 124 |
| Var_5 | A779C | N260T | 125, 126 |
| | A856T | K286C | |
| | A857G | | |
| | A858T | | |
| Var_6 | C550G | H184V | 127, 128 |
| | A551T | | |
| | C552T | | |
| Var_7 | G241T | A81W | 129, 130 |
| | C242G | E83K | |
| | T243G | | |
| | G247A | | |

[0450] Concentration (μM) values or area-under-the-curve (AUC) values for LC-MS derived peaks corresponding to several glycosides of steviol, ent-kaurenols (KL), and ent-kaurenoic acids (KA) were determined for each S. cerevisiae strain expressing an UGT74G1 SSL candidate. Results, normalized to cell OD₆₀₀ (μM/OD or AUC/OD) are shown in Tables 4-6.

TABLE 4
Production of 13-SMG, steviol-1,2-bioside, rubusosideRebB, RebA,
RebE, RebD and Reb M (in μM/OD₆₀₀) using UGT74G1 SSL candidates.

| | 13-SMG | Steviol-1,2-bioside | Rubusoside | RebB | RebA | RebE | RebD | RebM |
|---|---|---|---|---|---|---|---|---|
| UGT74G1 | 1.05 ± 0.17 | 0.02 ± 0.01 | 0.01 ± 0.02 | 0.58 ± 0.06 | 0.62 ± 0.08 | N/A | 0.68 ± 0.10 | 1.81 ± 0.23 |
| Mut 1 | 1.34 ± 0.15 | 0.02 ± 0.00 | 0.03 ± 0.01 | 0.90 ± 0.12 | 0.71 ± 0.03 | N/A | 0.59 ± 0.02 | 1.88 ± 0.12 |
| Mut 2 | 1.41 ± 0.01 | 0.02 ± 0.00 | 0.03 ± 0.01 | 0.82 ± 0.04 | 0.80 ± 0.07 | 0.01 ± 0.01 | 0.79 ± 0.06 | 2.38 ± 0.11 |
| Mut 3 | 6.07 ± 0.21 | 0.07 ± 0.01 | N/A | 2.81 ± 0.17 | 0.17 ± 0.02 | N/A | 0.25 ± 0.01 | 1.01 ± 0.06 |
| Mut 4 | 1.61 ± 0.06 | 0.02 ± 0.00 | 0.03 ± 0.00 | 0.90 ± 0.03 | 0.77 ± 0.01 | 0.01 ± 0.00 | 0.73 ± 0.01 | 2.30 ± 0.12 |
| Mut 5 | 1.36 ± 0.14 | 0.02 ± 0.00 | 0.04 ± 0.00 | 0.82 ± 0.12 | 0.76 ± 0.09 | 0.01 ± 0.01 | 0.66 ± 0.09 | 2.19 ± 0.32 |
| Mut 6 | 1.50 ± 0.09 | 0.02 ± 0.00 | 0.03 ± 0.01 | 0.91 ± 0.03 | 0.80 ± 0.04 | 0.01 ± 0.00 | 0.81 ± 0.03 | 2.44 ± 0.08 |
| Mut 7 | 2.15 ± 0.09 | 0.02 ± 0.00 | 0.03 ± 0.01 | 1.11 ± 0.04 | 0.92 ± 0.07 | 0.01 ± 0.00 | 0.97 ± 0.06 | 3.00 ± 0.18 |

TABLE 5
Production of 19-SMG, steviol-1,3-bioside, 1,2-stevioside, 1,3-stevioside, and compounds 4.26,
4.33, 5.24, 5.25, 6.1, 6.23, 7.2, and 7.5 (in AUC/OD₆₀₀) using UGT74G1 SSL candidates.

| | | | | 1,3- | | | | | | | | |
|---|---|---|---|---|---|---|---|---|---|---|---|---|
| | | steviol- | 1,2- | stevioside | | | | | | | | |
| | 19-SMG | 1,3-bioside | stevioside | (RebG) | # 4.26 | # 4.33 | # 5.24 | # 5.25 | # 6.1 | # 6.23 | # 7.2 | # 7.5 |
| UGT74G1 | 420 ± | N/A | 257 ± | N/A | 509 ± | 164 ± | 145 ± | 130 ± | 91 ± | N/A | 210 ± | 231 ± |
| | 50 | | 56 | | 66 | 41 | 13 | 87 | 11 | | 53 | 284 |
| Var_1 | 405 ± | 54 ± | 180 ± | N/A | 898 ± | 207 ± | 293 ± | 180 ± | 16 ± | N/A | 167 ± | 548 ± |
| | 28 | 37 | 7 | | 26 | 28 | 33 | 7 | 32 | | 36 | 69 |
| Var_2 | 594 ± | 16 ± | 230 ± | 16 ± | 1,040 ± | 192 ± | 154 ± | 230 ± | 76 ± | 43 ± | 248 ± | 381 ± |
| | 132 | 31 | 41 | 32 | 75 | 29 | 39 | 41 | 11 | 86 | 45 | 119 |
| Var_3 | N/A | 107 ± | N/A | N/A | 191 ± | 641 ± | N/A | N/A | 25 ± | N/A | 121 ± | N/A |
| | | 11 | | | 32 | 66 | | | 29 | | 12 | |
| Var_4 | 399 ± | N/A | 195 ± | N/A | 1,060 ± | 210 ± | 132 ± | 195 ± | 52 ± | N/A | 223 ± | 196 ± |
| | 20 | | 19 | | 66 | 28 | 96 | 19 | 36 | | 39 | 255 |
| Var_5 | 544 ± | 16 ± | 203 ± | 20 ± | 1,179 ± | 168 ± | 185 ± | 203 ± | 35 ± | N/A | 204 ± | 238 ± |
| | 83 | 32 | 23 | 39 | 98 | 29 | 61 | 23 | 43 | | 46 | 168 |
| Var_6 | 487 ± | N/A | 218 ± | N/A | 995 ± | 189 ± | 124 ± | 218 ± | 91 ± | N/A | 265 ± | 203 ± |
| | 49 | | 31 | | 93 | 5 | 17 | 31 | 18 | | 48 | 266 |
| Var_7 | 149 ± | 31 ± | 220 ± | 13 ± | 632 ± | 313 ± | 92 ± | 220 ± | 145 ± | 162 ± | 371 ± | 233 ± |
| | 22 | 36 | 37 | 27 | 79 | 42 | 9 | 37 | 39 | 109 | 28 | 157 |

TABLE 6
Production of glycosylated ent-kaurenoic acid and glycosylated
ent-kaurenols (in AUC/OD₆₀₀) using UGT74G1 SSL candidates.

| | KA2.7 | KA3.1 | KA3.2 | KL3.1 & KL3.2 |
|---|---|---|---|---|
| UGT74G1 | 1,026 ± 102 | 213 ± 31 | 4,338 ± 374 | 1,003 ± 93 |
| Var_1 | 1,190 ± 96 | 235 ± 33 | 6,991 ± 625 | 603 ± 90 |
| Var_2 | 1,014 ± 102 | 227 ± 28 | 6,055 ± 309 | 807 ± 95 |
| Var_3 | N/A | N/A | 24 ± 29 | 776 ± 96 |
| Var_4 | 871 ± 45 | 203 ± 38 | 5,710 ± 376 | 795 ± 46 |
| Var_5 | 1,070 ± 60 | 216 ± 51 | 6,413 ± 553 | 794 ± 64 |
| Var_6 | 947 ± 54 | 215 ± 58 | 5,415 ± 241 | 724 ± 76 |
| Var_7 | 312 ± 33 | 99 ± 19 | 2,314 ± 233 | 811 ± 74 |

[0451] As shown in Tables 4-6, expression of UGT74G1 SSL candidates results in increases and/or decreases in accumulation of one or more glycosides of steviol, ent-kaurenol, and/or ent-kaurenoic acid, providing an altered distribution of glycoside accumulation relative to a host expressing wild-type UGT74G1 polypeptide.

### Example 4

### Evaluation of UGT74G1-b-UGT85C2 and UGT85C2-b-UGT74G1 Chimeric Enzymes

[0452] UGT85C2 is expressed in the Stevia plant and catalyzes, among other reactions, the conversion of steviol to steviol-13-O-glycoside (13-SMG), which is further converted to rubusoside by UGT74G1. UGT74G1, however, may be localized in yeast cells differently than other steviol glycoside pathway enzymes, resulting in reduced apparent activity.

[0453] Fusion constructs of a GENEART™ codon optimized version of UGT74G1 (SEQ ID NO:1, SEQ ID NO:4) and UGT85C2 (SEQ ID NO:149, SEQ ID NO:7) were generated by adding a C-terminal Spel restriction site and two thymines to the leading UGT to obtain a “KLVK” tetra-peptide between the two UGTs. Fusion constructs were also generated by inserting the sequence encoding the above-mentioned tetra-peptide upstream of a sequence encoding the penta-peptide RASST, yielding the linker sequence “RASSTKLVK” (SEQ ID NO:150). Three such constructs, Chim_1-Chim_3, were generated (See, Table 7).

[0454] Fusion constructs of a GENEART™ codon optimized version of UGT74G1 (SEQ ID NO:1, SEQ ID NO:4) and UGT85C2 (SEQ ID NO:149, SEQ ID NO:7) were additionally generated by PCR stitching to directly fuse the N- and C-terminals of the two UGTs, or by flexibly linking the N- and C-terminals of the two UGTs with one or three repeats of the penta-peptide “GGGGS”, as described in Chen et al., “Fusion protein linkers: Property, design and functionality,” Advanced Drug Delivery Reviews 65(0):1257-69 (2013). Six such constructs, Chim_4-Chim_9 were generated (See, Table 7). Fusion constructs were expressed and analyzed according to Example 3.

TABLE 7
UGT74G1/UGT85C2 Chimeric Enzymes

| Name | Fusion Construct | SEQ ID NO |
|---|---|---|
| Chim_1 | UGT85C2 - RASSTKLVK - UGT74G1 | 131, 132 |
| Chim_2 | UGT74G1 - RASSTKLVK - UGT85C2 | 133, 134 |
| Chim_3 | UGT74G1 - KLVK - UGT85C2 | 135, 136 |
| Chim_4 | UGT85C2 - (GGGGS)₃ - UGT74G1 | 137, 138 |
| Chim_5 | UGT85C2 - (GGGGS)₁ - UGT74G1 | 139, 140 |
| Chim_6 | UGT85C2 - UGT74G1 | 141, 142 |
| Chim_7 | UGT74G1 - (GGGGS)₃ - UGT85C2 | 143, 144 |
| Chim_8 | UGT74G1 - (GGGGS)₁ - UGT85C2 | 145, 146 |
| Chim_9 | UGT74G1 - UGT85C2 | 147, 148 |

[0455] Concentration (μM) values or area-under-the-curve (AUC) values for LC-MS derived peaks corresponding to several steviol glycosides, ent-kaurenols (KL), and ent-kaurenoic acids (KA) were determined for each UGT74G1-b-UGT85C2 and UGT85C2-b-UGT74G1 chimeric enzyme. Results, normalized to cell OD₆₀₀ (μM/OD₆₀₀ or AUC/OD₆₀₀) are shown in Tables 8-10.

TABLE 8
Production of 13-SMG, steviol-1,2-bioside, RebB, RebA, RebE, RebD,
and RebM (in μM/OD₆₀₀) using UGT74G1/UGT85C2 chimeric enzymes.

| | 13-SMG | Steviol-1,2-bioside | Rubusoside | RebB | RebA | RebE | RebD | RebM |
|---|---|---|---|---|---|---|---|---|
| UGT74G1 | 1.05 ± 0.17 | 0.02 ± 0.01 | 0.01 ± 0.02 | 0.58 ± 0.06 | 0.62 ± 0.08 | N/A | 0.68 ± 0.10 | 1.81 ± 0.23 |
| Chim_1 | 1.75 ± 0.06 | 0.02 ± 0.00 | 0.02 ± 0.01 | 0.88 ± 0.04 | 0.69 ± 0.08 | N/A | 0.74 ± 0.06 | 1.95 ± 0.18 |
| Chim_2 | 1.64 ± 0.34 | 0.02 ± 0.00 | 0.01 ± 0.01 | 0.61 ± 0.21 | 0.34 ± 0.06 | N/A | 0.34 ± 0.08 | 0.94 ± 0.38 |
| Chim_3 | 2.93 ± 0.51 | 0.04 ± 0.02 | N/A | 1.56 ± 0.76 | 0.22 ± 0.07 | N/A | 0.22 ± 0.06 | 0.79 ± 0.28 |
| Chim_4 | 1.95 ± 0.19 | 0.02 ± 0.00 | 0.03 ± 0.00 | 1.01 ± 0.11 | 0.84 ± 0.10 | 0.01 ± 0.01 | 0.94 ± 0.09 | 2.62 ± 0.23 |
| Chim_5 | 2.20 ± 0.20 | 0.03 ± 0.00 | 0.03 ± 0.00 | 1.05 ± 0.13 | 0.75 ± 0.06 | 0.01 ± 0.01 | 0.76 ± 0.07 | 2.29 ± 0.25 |
| Chim_6 | 2.44 ± 0.35 | 0.03 ± 0.00 | 0.03 ± 0.00 | 1.12 ± 0.14 | 0.70 ± 0.09 | N/A | 0.73 ± 0.09 | 2.21 ± 0.29 |
| Chim_7 | 4.16 ± 0.86 | 0.04 ± 0.02 | 0.01 ± 0.01 | 1.62 ± 0.48 | 0.29 ± 0.29 | N/A | 0.30 ± 0.28 | 1.01 ± 0.91 |
| Chim_8 | 4.90 ± 0.75 | 0.04 ± 0.01 | 0.01 ± 0.02 | 1.88 ± 0.26 | 0.37 ± 0.23 | N/A | 0.43 ± 0.24 | 1.55 ± 0.85 |
| Chim_9 | 1.27 ± 0.24 | 0.01 ± 0.01 | 0.03 ± 0.01 | 0.82 ± 0.14 | 0.89 ± 0.09 | 0.00 ± 0.00 | 0.32 ± 0.03 | 1.07 ± 0.13 |

TABLE 9
Production of 19-SMG, steviol-1,3-bioside, 1,2-stevioside, 1,3-stevioside, and compounds 4.26, 4.33,
5.24, 5.25, 6.1, 6.23, 7.2, and 7.5 (in AUC/OD₆₀₀) using UGT74G1/UGT85C2 chimeric enzymes.

| | | | | 1,3- | | | | | | | | |
|---|---|---|---|---|---|---|---|---|---|---|---|---|
| | | steviol- | 1,2- | stevioside | | | | | | | | |
| | 19-SMG | 1,3-bioside | stevioside | (RebG) | # 4.26 | # 4.33 | # 5.24 | # 5.25 | # 6.1 | # 6.23 | # 7.2 | # 7.5 |
| UGT74G1 | 420 ± | N/A | 257 ± | N/A | 509 ± | 164 ± | 145 ± | 130 ± | 91 ± | N/A | 210 ± | 231 ± |
| | 50 | | 56 | | 66 | 41 | 13 | 87 | 11 | | 53 | 284 |
| Chim_1 | 78 ± | 21 ± | 311 ± | N/A | 444 ± | 217 ± | 40 ± | 177 ± | 99 ± | N/A | 236 ± | 220 ± |
| | 21 | 42 | 51 | | 101 | 20 | 79 | 39 | 17 | | 16 | 271 |
| Chim_2 | 59 ± | 20 ± | 181 ± | N/A | 219 ± | 129 ± | 63 ± | 38 ± | 41 ± | N/A | 118 ± | 71 ± |
| | 46 | 39 | 59 | | 121 | 88 | 73 | 77 | 49 | | 79 | 142 |
| Chim_3 | N/A | 61 ± | 97 ± | N/A | 189 ± | 341 ± | N/A | N/A | N/A | N/A | 62 ± | N/A |
| | | 81 | 34 | | 108 | 181 | | | | | 72 | |
| Chim_4 | 109 ± | 55 ± | 389 ± | 38 ± | 675 ± | 253 ± | 113 ± | 191 ± | 149 ± | 166 ± | 368 ± | 63 ± |
| | 18 | 38 | 38 | 44 | 86 | 51 | 83 | 25 | 31 | 115 | 81 | 127 |
| Chim_5 | 128 ± | 47 ± | 345 ± | 17 ± | 683 ± | 250 ± | 171 ± | 199 ± | 69 ± | 53 ± | 264 ± | 68 ± |
| | 20 | 54 | 47 | 35 | 199 | 27 | 53 | 25 | 48 | 106 | 50 | 135 |
| Chim_6 | 82 ± | 58 ± | 291 ± | 17 ± | 563 ± | 285 ± | 109 ± | 232 ± | 77 ± | 46 ± | 276 ± | 211 ± |
| | 25 | 42 | 64 | 33 | 87 | 70 | 83 | 34 | 12 | 92 | 53 | 262 |
| Chim_7 | 31 ± | 94 ± | 113 ± | N/A | 336 ± | 337 ± | 36 ± | 54 ± | 26 ± | N/A | 115 ± | N/A |
| | 63 | 67 | 128 | | 191 | 129 | 71 | 107 | 52 | | 156 | |
| Chim_8 | 25 ± | 55 ± | 166 ± | 15 ± | 367 ± | 427 ± | 76 ± | 93 ± | 16 ± | 58 ± | 215 ± | 89 ± |
| | 50 | 37 | 67 | 30 | 125 | 55 | 89 | 118 | 32 | 116 | 152 | 178 |
| Chim_9 | 1,031 ± | 52 ± | 383 ± | 20 ± | 761 ± | 190 ± | 867 ± | 3583 ± | 24 ± | 116 ± | 101 ± | 51 ± |
| | 145 | 37 | 67 | 39 | 108 | 27 | 81 | 316 | 28 | 135 | 7 | 102 |

TABLE 10
Production of glycosylated ent-kaurenoic acid and glycosylated ent-kaurenols
(in AUC/OD₆₀₀) using UGT74G1/UGT85C2 chimeric enzymes.

| | | | | | KL3.1 & |
|---|---|---|---|---|---|
| | KA2.7 | KA3.1 | KA3.2 | KL2.8 | KL3.2 |
| UGT74G1 | 1,026 ± 102 | 213 ± 31 | 4,338 ± 374 | N/A | 1,003 ± 93 |
| Chim_1 | 471 ± 132 | 103 ± 23 | 1,880 ± 680 | N/A | 1,118 ± 121 |
| Chim_2 | 338 ± 35 | 24 ± 49 | 970 ± 392 | N/A | 661 ± 282 |
| Chim_3 | N/A | N/A | 321 ± 202 | 35 ± 71 | 882 ± 461 |
| Chim_4 | 485 ± 81 | 112 ± 26 | 2,444 ± 401 | N/A | 1,133 ± 83 |
| Chim_5 | 601 ± 64 | 127 ± 36 | 3,088 ± 736 | N/A | 1,100 ± 30 |
| Chim_6 | 425 ± 31 | 114 ± 17 | 2,095 ± 443 | N/A | 1,002 ± 206 |
| Chim_7 | 84 ± 168 | 23 ± 46 | 495 ± 675 | 66 ± 77 | 1,190 ± 783 |
| Chim_8 | 137 ± 159 | 28 ± 56 | 748 ± 667 | N/A | 1,192 ± 343 |
| Chim_9 | 785 ± 82 | 164 ± 27 | 4,798 ± 899 | 245 ± 11 | 4,240 ± 306 |

[0456] As shown in Tables 8-10, expression of UGT74G1/UGT85C2 chimeric enzymes results in increases and/or decreases in accumulation of one or more glycosides of steviol, ent-kaurenol, and/or ent-kaurenoic acid, providing an altered distribution of glycoside accumulation relative to a host expressing wild-type UGT74G1 and/or UGT85C2.

### Example 5

### Expression of Tagged UGT74G1 Polypeptides

[0457] A steviol glycoside-producing S. cerevisiae strain as described in Example 2, further comprising and expressing a recombinant gene encoding a KO polypeptide (SEQ ID NO:117, SEQ ID NO:64) and a recombinant gene encoding a KAH polypeptide (SEQ ID NO:96, SEQ ID NO:97), was further engineered to disrupt expression of native UGT74G1 polypeptide.

[0458] The native UGT74G1-disrupted strain was engineered to comprise and express a tagged UGT74G1 protein. The tags were disulfide oxidoreductase (DsbA: SEQ ID NO:156, SEQ ID NO:152), maltose binding protein (MBP; SEQ ID NO:157, SEQ ID NO:153), N-utilization substance (NusA; SEQ ID NO:158, SEQ ID NO:154), small ubiquitin-like modifier (SUMO; SEQ ID NO:159, SEQ ID NO:155). Without being bound by theory, the results suggest that such tags play a role in increasing solubility of UGTs such as UGT74G1, which may result in increased accumulation of steviol glycosides, including RebD and RebM. See FIGS. 7-14.

### Example 6

### Modulation of Substrate-Specificity of UGT74G1 (Continued)

[0459] UGT74G1 is expressed in the Stevia plant and catalyzes, among other reactions, the conversion of 13-SMG to rubusoside. Because UGT74G1 demonstrates substrate promiscuity and 13-SMG accumulates in steviol glycoside-producing hosts, alternate genes for catalyzing 13-SMG to rubusoside were identified.

[0460] A homology model of UGT74G1 was generated from the crystal structure of UGT78K6 (PDB:2C1Z), using Rebaudioside B (RebB) as a substrate for docking analysis. RebB was chosen because it is the largest steviol glycoside UGT74G1 is known to have activity on. The homology model was generated using the modeling suite in the Molecular Operating Environment (MOE) software (Chemical Computing Group).

[0461] Twenty-seven amino acids were determined to be within 4.5 Å of RebB in the homology model. Results are shown in Table 2 (see Example 3, above). A UGT74G1 site saturation library (SSL) screen of the 27 amino acids was prepared using GENEART™ (Thermo Fisher Scientific) in a GENEART™ codon optimized version of UGT74G1 (SEQ ID NO:1, SEQ ID NO:4). Histidine 23 (i.e., His23) is fully conserved and is believed to be catalytically active, and as such was not included in the site saturation library. In addition to the variants expressed in Example 3, above, 1056 site saturated variants were expressed with the p416-GPD vector in a steviol glycoside producing S. cerevisiae strain as described in Example 2, further comprising and expressing a recombinant gene encoding a KO polypeptide (SEQ ID NO:117, SEQ ID NO:64) and a recombinant gene encoding a KAH polypeptide (SEQ ID NO:96, SEQ ID NO:97), and further engineered to disrupt expression of native UGT74G1 polypeptide. The strains were incubated in 1 mL synthetic complete (SC) uracil dropout media at 30° C. for five days, shaking at 400 rpm. 50 μL of each culture was transferred into 50 μL DMSO, incubated at 80° C. for 10 minutes, and centrifuged at 3220 g for 5 minutes. 15 μL of the resulting supernatant was then transferred to 105 μL 50% DMSO for LC-MS analysis.

[0462] 5 candidates (Var_8-Var_12) were selected from the SSL variants and sequenced (See, Table 11).

TABLE 11
Sequenced UGT74G1 Variants

| Name | Nucleotide Changes | Amino Acid Changes | SEQ ID NO |
|---|---|---|---|
| Var_8 | G241T | A81W | 160, 161 |
| | C242G | | |
| | T243G | | |
| Var_9 | C550A | H184T | 162, 163 |
| | A551C | | |
| | C552T | | |
| Var_10 | A858T | K286N | 164, 165 |
| Var_11 | A235G | M79E | 166, 167 |
| | T236A | | |
| | G237A | | |
| Var_12 | A857C | K286T | 168, 169 |
| | A858T | | |

[0463] Concentration (μM) values or area-under-the-curve (AUC) values for LC-MS derived peaks corresponding to several glycosides of steviol and ent-kaurenoic acids (KA) were determined for each S. cerevisiae strain expressing an UGT74G1 SSL candidate. Results, normalized to cell OD₆₀₀ (μM/OD or AUC/OD) are shown in Tables 12-14.

TABLE 12
Production of 13-SMG, 19-SMG, steviol-1,2-bioside, rubusoside, RebG,
RebB, RebA, RebD and RebM (in μM/OD₆₀₀) using UGT74G1 SSL candidates.

| | | | | | 1,3- | | | | |
|---|---|---|---|---|---|---|---|---|---|
| | | | Steviol- | | stevioside | | | | |
| | 13-SMG | 19-SMG | 1,2-bioside | Rubusoside | (RebG) | RebB | RebA | RebD | RebM |
| UGT74G1 | 1.10 ± 0.22 | 0.09 ± 0.01 | 0.04 ± 0.00 | 0.06 ± 0.01 | 0.02 ± 0.01 | 0.67 ± 0.04 | 0.64 ± 0.03 | 0.56 ± 0.04 | 1.98 ± 0.23 |
| Var_8 | 1.57 ± 0.17 | 0.06 ± 0.00 | 0.04 ± 0.00 | 0.07 ± 0.00 | 0.03 ± 0.00 | 0.88 ± 0.07 | 0.71 ± 0.05 | 0.64 ± 0.04 | 2.32 ± 0.16 |
| Var_9 | 1.74 ± 0.28 | 0.08 ± 0.01 | 0.05 ± 0.00 | 0.08 ± 0.01 | 0.03 ± 0.00 | 0.97 ± 0.10 | 0.73 ± 0.06 | 0.68 ± 0.05 | 2.32 ± 0.28 |
| Var_10 | 1.40 ± 0.08 | 0.09 ± 0.00 | 0.04 ± 0.00 | 0.07 ± 0.01 | 0.03 ± 0.00 | 0.78 ± 0.04 | 0.65 ± 0.04 | 0.54 ± 0.05 | 2.29 ± 0.26 |
| Var_11 | 1.24 ± 0.17 | 0.09 ± 0.01 | 0.04 ± 0.00 | 0.07 ± 0.01 | 0.02 ± 0.01 | 0.68 ± 0.06 | 0.63 ± 0.08 | 0.60 ± 0.08 | 2.10 ± 0.24 |
| Var_12 | 0.71 ± 0.27 | 0.07 ± 0.01 | 0.02 ± 0.02 | 0.04 ± 0.03 | 0.01 ± 0.01 | 0.44 ± 0.12 | 0.46 ± 0.10 | 0.40 ± 0.13 | 1.26 ± 0.47 |

TABLE 13
Production of steviol-1,3-bioside, 1,2-stevioside, and compounds 4.26, 4.33, 5.24,
5.25, 6.1, 6.23, 7.2, and 7.5 (in AUC/OD₆₀₀) using UGT74G1 SSL candidates.

| | steviol- | 1,2- | | | | | | | | |
|---|---|---|---|---|---|---|---|---|---|---|
| | 1,3-bioside | stevioside | # 4.26 | # 4.33 | # 5.24 | # 5.25 | # 6.1 | # 6.23 | # 7.2 | # 7.5 |
| UGT74G1 | 0 ± 0 | 336 ± 36 | 1273 ± 306 | 157 ± 58 | 638 ± 89 | 409 ± 24 | 32 ± 55 | 0 ± 0 | 126 ± 218 | 472 ± 216 |
| Var_8 | 0 ± 0 | 340 ± 20 | 1074 ± 142 | 218 ± 21 | 545 ± 36 | 444 ± 18 | 80 ± 77 | 0 ± 0 | 356 ± 28 | 0 ± 0 |
| Var_9 | 0 ± 0 | 387 ± 15 | 1353 ± 328 | 181 ± 41 | 692 ± 173 | 436 ± 13 | 136 ± 22 | 0 ± 0 | 402 ± 19 | 645 ± 559 |
| Var_10 | 0 ± 0 | 310 ± 17 | 1720 ± 201 | 67 ± 116 | 638 ± 107 | 416 ± 67 | 59 ± 51 | 86 ± 149 | 127 ± 219 | 0 ± 0 |
| Var_11 | 0 ± 0 | 316 ± 93 | 1815 ± 190 | 204 ± 36 | 687 ± 134 | 372 ± 84 | 93 ± 81 | 0 ± 0 | 269 ± 237 | 327 ± 566 |
| Var_12 | 0 ± 0 | 243 ± 59 | 836 ± 448 | 115 ± 108 | 386 ± 339 | 221 ± 191 | 60 ± 52 | 0 ± 0 | 0 ± 0 | 234 ± 405 |

TABLE 14
Production of glycosylated ent-kaurenoic acid (in AUC/OD₆₀₀)
using UGT74G1 SSL candidates.

| | KA2.7 | KA3.1 | KA3.2 |
|---|---|---|---|
| UGT74G1 | 1184 ± 75 | 246 ± 34 | 6195 ± 585 |
| Var_8 | 597 ± 51 | 44 ± 76 | 3351 ± 445 |
| Var_9 | 856 ± 108 | 152 ± 133 | 4618 ± 709 |
| Var_10 | 1304 ± 33 | 293 ± 32 | 7407 ± 867 |
| Var_11 | 1685 ± 141 | 285 ± 21 | 8029 ± 1079 |
| Var_12 | 833 ± 157 | 135 ± 117 | 3836 ± 1664 |

[0464] As shown in Tables 12-14, expression of UGT74G1 SSL candidates results in increases and/or decreases in accumulation of one or more glycosides of steviol, ent-kaurenol, and/or ent-kaurenoic acid, providing an altered distribution of glycoside accumulation relative to a host expressing wild-type UGT74G1 polypeptide.

### Example 7

### Expression of Tagged UGT74G1 Polypeptides (Strain 1)

[0465] A steviol glycoside-producing S. cerevisiae strain as described in Example 2, comprising and expressing a recombinant gene encoding a KO polypeptide (SEQ ID NO:117, SEQ ID NO:64) and a recombinant gene encoding a KAH polypeptide (SEQ ID NO:96, SEQ ID NO:97), was further engineered to disrupt expression of native UGT74G1 polypeptide.

[0466] The strain was further transformed to comprise and express tagged UGT74G1 polypeptide candidates operably linked to a TEF1 promoter (SEQ ID NO:170) and a ADH1 terminator (SEQ ID NO:171). Tagged constructs of a GENEART™ codon optimized version of UGT74G1 (SEQ ID NO:1, SEQ ID NO:4) and the tags of interest at the N terminal part of the protein, including disulfide oxidoreductase (DsbA: SEQ ID NO:156, SEQ ID NO:152), maltose binding protein (MBP; SEQ ID NO:157, SEQ ID NO:153), N-utilization substance (NusA; SEQ ID NO:158, SEQ ID NO:154) and small ubiquitin-like modifier (SUMO; SEQ ID NO:159, SEQ ID NO:155) were generated by PCR-stiching both fragments with a soluble linker (SEQ ID NO:172, SEQ ID NO:151). See Table 15.

TABLE 15
Tagged UGTG74G1 Polypeptides

| Name | Construct | SEQ ID NO |
|---|---|---|
| Chim_10 | DsbA-EGKSSGSGSESKST-UGT74 | 173, 174 |
| Chim_11 | MBP-EGKSSGSGSESKST-UGT74 | 175, 176 |
| Chim_12 | NusA-EGKSSGSGSESKST-UGT74 | 177, 178 |
| Chim_13 | SUMO-EGKSSGSGSESKST-UGT74 | 179, 180 |

[0467] Transformants were selected on antibiotic plates and presence of the construct was verified by PCR.

[0468] Single colonies of transformed strains were grown in 500 μL of buffered Delft medium in a in a Duetz 96-deepwell plate system for one day at 30° C. C in Kuhner ISF-1-W Incubator, shaking at 280 rpm. 50 μL of the cell culture from each well was then transferred to a new Duetz 96-deepwell plate system containing 450 μL of of buffered Delft medium. The deepwell plates were then grown for 4 days at 30° C. in Kuhner ISF-1-W Incubator, shaking at 280 rpm before ready for LC-MS analysis. Samples for LC-MS analysis were prepared by extracting 100 μL of cell solution with 100 μL of DMSO, vortexing until mixed, and incubating at 80° C. for 10 minutes. The resultant extract was clarified by centrifugation at 10,000 g for 10 min. 20 μL of the supernatant was diluted with 140 μL of 50% (v/v) DMSO for LC-MS injection. LC-MS data was normalized to the OD₆₀₀ of a mixture of 100 μL of the cell solution and 100 μL of water, measured on an ENVISION® Multilabel Reader (PerkinElmer, Waltham, Mass.).

[0469] LC-MS analysis was performed according to Example 1. Results, of the average of 6 independent clones, are shown in Tables 16-18.

TABLE 16
Production of 13-SMG, 19-SMG, steviol-1,2-bioside, RebB, RebA, RebE, RebD, and RebM (in μM/OD₆₀₀) using
tagged UGT74G1 polypeptides (SEQ ID NOs: 174, 176, 178, and 180) or WT UGT74G1 polypeptide (SEQ ID NO: 4).

| | 13-SMG | 19-SMG | steviol-1,2-bioside | rubusoside | RebB | RebA | RebE | RebD | RebM |
|---|---|---|---|---|---|---|---|---|---|
| UGT74G1 | 4.99 ± 5.90 | 0.50 ± 0.46 | 0.08 ± 0.02 | 0.56 ± 0.51 | 2.38 ± 1.59 | 3.65 ± 1.47 | 0.02 ± 0.02 | 2.27 ± 0.19 | 6.88 ± 1.08 |
| Chim_10 | 7.49 ± 1.43 | 0.08 ± 0.06 | 0.05 ± 0.02 | 0.21 ± 0.07 | 1.17 ± 0.37 | 3.32 ± 0.67 | 0.02 ± 0.02 | 3.23 ± 0.52 | 13.37 ± 2.30 |
| Chim_11 | 7.59 ± 1.52 | 0.12 ± 0.06 | 0.05 ± 0.01 | 0.38 ± 0.19 | 1.53 ± 0.31 | 4.54 ± 1.11 | 0.00 ± 0.01 | 3.03 ± 0.89 | 10.53 ± 2.90 |
| Chim_12 | 5.46 ± 1.76 | 0.28 ± 0.11 | 0.06 ± 0.01 | 0.43 ± 0.13 | 1.64 ± 0.36 | 4.85 ± 0.73 | 0.01 ± 0.02 | 3.41 ± 0.88 | 10.40 ± 2.79 |
| Chim_13 | 7.71 ± 2.54 | 0.27 ± 0.06 | 0.09 ± 0.03 | 0.50 ± 0.22 | 2.47 ± 0.92 | 4.92 ± 0.55 | 0.00 ± 0.00 | 3.00 ± 0.81 | 8.16 ± 2.26 |

TABLE 17
Production of steviol-1,3-bioside, 1,2-stevioside, 1,3-stevioside, and compounds 4.26,
4.33, 5.24, 4.25, 6.1, 6.23, 7.1, and 7.5 (in AUC/OD₆₀₀) using tagged UGT74G1 polypeptides
(SEQ ID NOs: 174, 176, 178, and 180) or WT UGT74G1 polypeptide (SEQ ID NO: 4).

| | | | 1,3- | | | | | | | | |
|---|---|---|---|---|---|---|---|---|---|---|---|
| | steviol- | 1,2- | stevioside | | | | | | | | |
| | 1,3-bioside | stevioside | (RebG) | # 4.26 | # 4.33 | # 5.24 | # 5.25 | # 6.1 | # 6.23 | # 7.1 | # 7.5 |
| UGT74G1 | 267 ± | 3980 ± | 606 ± | 13189 ± | 295 ± | 1444 ± | 2130 ± | 201 ± | 490 ± | 1076 ± | 1093 ± |
| | 243 | 1604 | 171 | 598 | 589 | 633 | 797 | 232 | 150 | 364 | 1089 |
| Chim_10 | 86 ± | 3671 ± | 399 ± | 8842 ± | 0 ± | 2187 ± | 3307 ± | 801 ± | 1468 ± | 3097 ± | 1134 ± |
| | 141 | 701 | 85 | 2610 | 0 | 1246 | 731 | 126 | 152 | 686 | 1378 |
| Chim_11 | 220 ± | 4705 ± | 473 ± | 7308 ± | 73 ± | 1372 ± | 3058 ± | 587 ± | 1388 ± | 2246 ± | 1087 ± |
| | 171 | 1277 | 125 | 2416 | 178 | 461 | 698 | 474 | 495 | 1413 | 746 |
| Chim_12 | 157 ± | 5102 ± | 398 ± | 8223 ± | 0 ± | 1546 ± | 3082 ± | 642 ± | 1192 ± | 2276 ± | 491 ± |
| | 275 | 660 | 213 | 1272 | 0 | 903 | 1063 | 384 | 380 | 1198 | 555 |
| Chim_13 | 453 ± | 5134 ± | 374 ± | 7081 ± | 174 ± | 614 ± | 2307 ± | 420 ± | 1013 ± | 1423 ± | 432 ± |
| | 404 | 491 | 218 | 1351 | 427 | 373 | 395 | 333 | 387 | 678 | 478 |

TABLE 18
Production of glycosylated ent-kaurenoic acid (in AUC/OD₆₀₀)
using tagged UGT74G1 polypeptides (SEQ ID NOs: 174, 176,
178, and 180) or WT UGT74G1 polypeptide (SEQ ID NO: 4).

| | KA2.7 | KA3.1 | KA3.2 |
|---|---|---|---|
| UGT74G1 | 6537 ± 2312 | 1008 ± 555 | 30440 ± 11785 |
| Chim_10 | 1702 ± 425 | 713 ± 211 | 12809 ± 3137 |
| Chim_11 | 1228 ± 405 | 379 ± 336 | 8641 ± 3274 |
| Chim_12 | 2561 ± 1340 | 738 ± 562 | 15009 ± 7935 |
| Chim_13 | 2018 ± 456 | 383 ± 230 | 9503 ± 3167 |

[0470] As shown in Tables 16-18, expression of tagged UGT74G1 fusion candidates in yeast cause in general a decrease of KA+2Glc, KA+3Glc isomer2, KA-3Glc isomer1, RebB and Rubusoside. Concomitantly, increasing accumulation of higher molecular weight steviol glycosides is seen, indicating a better conversion of steviol glycosides and other intermediates towards at least RebD and RebM by tagged UGT74G1 fusion candidates compared to the wild-type UGT74G1 enzyme. Without being bound by theory, the results suggest that that the tags play a role in increasing solubility of polypeptides, such as UGT74G1, and therefore a better activity of it which may result in increased accumulation of steviol glycosides, including RebD and RebM. See FIGS. 7-14.

### Example 8

### Expression of Tagged UGT74G1 Polypeptides (Strain 2)

[0471] A steviol glycoside-producing S. cerevisiae strain as described in Example 2, further engineered to comprise and express a recombinant gene encoding a KO polypeptide (SEQ ID NO:117, SEQ ID NO:64) and a recombinant gene encoding a KAH polypeptide (SEQ ID NO:96, SEQ ID NO:97), was transformed with two independent integrative vectors comprising a tagged UGT74G1 polypeptide (as described in Example 7) operably linked to a TEF1 promoter (SEQ ID NO:170) and an ADH1 terminator (SEQ ID NO:171). Transformants were selected on antibiotic plates and presence of the construct was verified by PCR.

[0472] Single colonies of transformed strains were grown in 500 μL of buffered Delft medium in a in a Duetz 96-deepwell plate system for one day at 30° C. C in Kuhner ISF-1-W Incubator, shaking at 280 rpm. 50 μL of the cell culture from each well was then transferred to a new Duetz 96-deepwell plate system containing 450 μL of of buffered Delft medium. The deepwell plates were then grown for 4 days at 30° C. in Kuhner ISF-1-W Incubator, shaking at 280 rpm before ready for LC-MS analysis. Samples for LC-MS analysis were prepared by extracting 100 μL of cell solution with 100 μL of DMSO, vortexing until mixed, and incubating at 80° C. for 10 minutes. The resultant extract was clarified by centrifugation at 10,000 g for 10 min. 20 μL of the supernatant was diluted with 140 μL of 50% (v/v) DMSO for LC-MS injection. LC-MS data was normalized to the OD₆₀₀ of a mixture of 100 μL of the cell solution and 100 μL of water, measured on an ENVISION® Multilabel Reader (PerkinElmer, Waltham, Mass.).

[0473] LC-MS analysis was performed according to Example 1. Results of the average of 6 clones for each constructs are shown in FIGS. 10 to 12.

[0474] Expression of solubility tagged UGT74G1 fusion candidates in a steviol glycosides producing strain cause a decreased accumulation of all UGT74G1 dependant substrates: KA+2Glc (#7), KA+3Glc isomer2 and KA-3Glc isomer1 and 13-SMG. Without being bound by theory, the results suggest that expression of tagged UGT74G1 having improved solubility increases accumulation of one or more glycosides of steviol due to a better conversion of steviol precursors, such as ent-kaurenoic acid, to steviol, and a better conversion of steviol glycoside precurosors, such as 13-SMG, toward RebD and RebM, as compared to wild-type UGT74G1 polypeptide.

### Example 9

### Expression of Tagged UGT74G1 Polypeptides (Strains 3 and 4)

[0475] A steviol glycoside-producing S. cerevisiae strain as described in Example 2, further engineered to comprise and express a recombinant gene encoding a KAH polypeptide (SEQ ID NO:96, SEQ ID NO:97) and a recombinant gene encoding a KO polypeptide (SEQ ID NO:117, SEQ ID NO:64), was transformed with vectors comprising an additional copy of the gene encoding a YNK1 polypeptide (SEQ ID NO:181, SEQ ID NO:182), operably linked to a pTEF1 promoter (SEQ ID NO:170) and a CYC1 terminator (SEQ ID NO:183), an additional copy of the gene encoding a PGM1 polypeptide (SEQ ID NO:184, SEQ ID NO:185), operably linked to a pTEF1 promoter (SEQ ID NO:170) and a CYC1 terminator (SEQ ID NO:183), an additional copy of the gene encoding a PGM2 polypeptide (SEQ ID NO:186, SEQ ID NO:187), operably linked to a pPGK1 promoter (SEQ ID NO:188) and a tADH1 terminator (SEQ ID NO:171), and an additional copy of the gene encoding a UGP1 polypeptide (SEQ ID NO:189, SEQ ID NO:190), operably linked to a pPGK1 promoter (SEQ ID NO:188) and a tADH1 terminator (SEQ ID NO:171). Two independents clones were transformed with a vector comprising a tagged UGT74G1 polypeptide (as described in Example 7) operably linked to a TEF1 promoter (SEQ ID NO:170) and an ADH1 terminator (SEQ ID NO:171). Transformants were selected on antibiotic plates and presence of the construct was verified by PCR.

[0476] Single colonies of transformed strains were grown in 500 μL of buffered Delft medium in a in a Duetz 96-deepwell plate system for one day at 30° C. C in Kuhner ISF-1-W Incubator, shaking at 280 rpm. 50 μL of the cell culture from each well was then transferred to a new Duetz 96-deepwell plate system containing 450 μL of of buffered Delft medium. The deepwell plates were then grown for 4 days at 30° C. in Kuhner ISF-1-W Incubator, shaking at 280 rpm before ready for LC-MS analysis. Samples for LC-MS analysis were prepared by extracting 100 μL of cell solution with 100 μL of DMSO, vortexing until mixed, and incubating at 80° C. for 10 minutes. The resultant extract was clarified by centrifugation at 10,000 g for 10 min. 20 μL of the supernatant was diluted with 140 μL of 50% (v/v) DMSO for LC-MS injection. LC-MS data was normalized to the OD₆₀₀ of a mixture of 100 μL of the cell solution and 100 μL of water, measured on an ENVISION® Multilabel Reader (PerkinElmer, Waltham, Mass.).

[0477] LC-MS analysis was performed according to Example 1. Results are shown in FIGS. 13 and 14.

[0478] Expression of tagged UGT74G1 polypeptides in a steviol glycoside-producing strain caused a decrease of accumulation of UGT74G1-dependant substrates, including KA+2Glc (#7), KA+3Glc (isomer2), KA+3Glc (isomer1), and 13-SMG. Without being bound by theory, the results suggest that expression of tagged UGT74G1 polypeptides having improved solubility increases accumulation of one or more steviol glycosides due to a better conversion of steviol precursors to steviol, and further glycosylation of steviol glycoside precursors towards, for example, RebD and RebM, as compared to wild-type UGT74G1 polypeptide.

[0479] Having described the invention in detail and by reference to specific embodiments thereof, it will be apparent that modifications and variations are possible without departing from the scope of the invention defined in the appended claims. More specifically, although some aspects of the present invention are identified herein as particularly advantageous, it is contemplated that the present invention is not necessarily limited to these particular aspects of the invention.

TABLE 19
Sequences disclosed herein.

SEQ ID NO: 1
Artificial Sequence

| | |
|---|---|
| atggctgaac aacaaaagat caagaagtct ccacacgttt tgttgattcc atttccattg | 60 |
| caaggtcaca tcaacccatt cattcaattc ggtaagagat tgatttccaa gggtgttaag | 120 |
| actactttgg ttactaccat ccataccttg aactctacct tgaaccattc taacactacc | 180 |
| accacctcca ttgaaattca agctatttcc gatggttgtg atgaaggtgg ttttatgtct | 240 |
| gctggtgaat cttacttgga aacctttaag caagttggtt ctaagtcctt ggccgatttg | 300 |
| attaagaagt tgcaatctga aggtactacc attgatgcca ttatctacga ttctatgacc | 360 |
| gaatgggttt tggatgttgc tattgaattc ggtattgatg gtggttcatt cttcactcaa | 420 |
| gcttgtgttg ttaactcctt gtactaccat gttcacaagg gtttgatctc attgccattg | 480 |
| ggtgaaactg tttctgttcc aggtttccca gttttacaaa gatgggaaac tccattgatc | 540 |
| ttgcaaaacc acgaacaaat tcaatctcca tggtcccaaa tgttgtttgg tcaattcgcc | 600 |
| aacattgatc aagctagatg ggtttttacc aactccttct acaagttgga agaagaagtt | 660 |
| atcgaatgga ccagaaagat ctggaacttg aaagttattg gtccaacctt gccatctatg | 720 |
| tacttggata agagattgga tgacgataag gacaacggtt tcaacttgta caaggctaac | 780 |
| catcatgaat gcatgaattg gttggacgac aagccaaaag aatccgttgt ttatgttgct | 840 |
| ttcggttctt tggtcaaaca tggtccagaa caagttgaag aaattaccag agccttgatc | 900 |
| gattccgatg ttaatttctt gtgggtcatc aagcacaaag aagaaggtaa attgccagaa | 960 |
| aacttgtccg aagttatcaa aactggtaag ggtttgattg tcgcttggtg taaacaattg | 1020 |
| gatgttttgg ctcatgaatc cgttggttgt ttcgttactc attgtggttt caactccacc | 1080 |
| ttggaagcta tttctttggg tgttccagtt gttgctatgc cacaattttc tgatcaaact | 1140 |
| accaacgcta agttgttgga cgaaattttg ggtgttggtg ttagagttaa ggctgacgaa | 1200 |
| aatggtatcg ttagaagagg taacttggct tcttgcatca agatgatcat ggaagaagaa | 1260 |
| agaggtgtca tcattagaaa gaacgctgtt aagtggaagg atttggctaa agttgctgtt | 1320 |
| catgaaggtg gtagttccga taatgatatc gttgaattcg tttccgaatt gatcaaggcc | 1380 |
| taa | 1383 |

SEQ ID NO: 2
Artificial Sequence

| | |
|---|---|
| atggctgaac aacaaaagat caagaagtct ccacacgttt tgttgattcc atttccattg | 60 |
| caaggtcaca tcaacccatt cattcaattc ggtaagagat tgatttccaa gggtgttaag | 120 |
| actactttgg ttactaccat ccataccttg aactctacct tgaaccattc taacactacc | 180 |
| accacctcca ttgaaattca agctatttcc gatggttgtg atgaaggtgg ttttatgtct | 240 |
| gctggtgaat cttacttgga aacctttaag caagttggtt ctaagtcctt ggccgatttg | 300 |
| attaagaagt tgcaatctga aggtactacc attgatgcca ttatctacga ttctatgacc | 360 |
| gaatgggttt tggatgttgc tattgaattc ggtattgatg gtggttcatt cttcactcaa | 420 |
| gcttgtgttg ttaactcctt gtactaccat gttcacaagg gtttgatctc attgccattg | 480 |
| ggtgaaactg tttctgttcc aggtttccca gttttacaaa gatgggaaac tccattgatc | 540 |
| ttgcaaaacc acgaacaaat tcaatctcca tggtcccaaa tgttgtttgg tcaattcgcc | 600 |
| aacattgatc aagctagatg ggtttttacc aactccttct acaagttgga agaagaagtt | 660 |
| atcgaatgga ccagaaagat ctggaacttg aaagttattg gtccaacctt gccatctatg | 720 |
| tacttggata agagattgga tgacgataag gacaacggtt tcaacttgta caaggctaac | 780 |
| catcatgaat gcatgaattg gttggacgac aagccaaaag aatccgttgt ttatgttgct | 840 |
| ttcggttctt tggtcgaaca tggtccagaa caagttgaag aaattaccag agccttgatc | 900 |
| gattccgatg ttaatttctt gtgggtcatc aagcacaaag aagaaggtaa attgccagaa | 960 |
| aacttgtccg aagttatcaa aactggtaag ggtttgattg tcgcttggtg taaacaattg | 1020 |
| gatgttttgg ctcatgaatc cgttggttgt ttcgttactc attgtggttt caactccacc | 1080 |
| ttggaagcta tttctttggg tgttccagtt gttgctatgc cacaattttc tgatcaaact | 1140 |
| accaacgcta agttgttgga cgaaattttg ggtgttggtg ttagagttaa ggctgacgaa | 1200 |
| aatggtatcg ttagaagagg taacttggct tcttgcatca agatgatcat ggaagaagaa | 1260 |
| agaggtgtca tcattagaaa gaacgctgtt aagtggaagg atttggctaa agttgctgtt | 1320 |
| catgaaggtg gtagttccga taatgatatc gttgaattcg tttccgaatt gatcaaggcc | 1380 |
| taa | 1383 |

SEQ ID NO: 3
Stevia rebaudiana

| | |
|---|---|
| atggcagagc aacaaaagat caaaaagtca cctcacgtct tacttattcc atttcctctg | 60 |
| caaggacata tcaacccatt catacaattt gggaaaagat tgattagtaa gggtgtaaag | 120 |
| acaacactgg taaccactat ccacactttg aattctactc tgaaccactc aaatactact | 180 |
| actacaagta tagaaattca agctatatca gacggatgcg atgagggtgg ctttatgtct | 240 |
| gccggtgaat cttacttgga aacattcaag caagtgggat ccaagtctct ggccgatcta | 300 |
| atcaaaaagt tacagagtga aggcaccaca attgacgcca taatctacga ttctatgaca | 360 |
| gagtgggttt tagacgttgc tatcgaattt ggtattgatg gaggttcctt tttcacacaa | 420 |
| gcatgtgttg tgaattctct atactaccat gtgcataaag ggttaatctc tttaccattg | 480 |
| ggtgaaactg tttcagttcc aggttttcca gtgttacaac gttgggaaac cccattgatc | 540 |
| ttacaaaatc atgaacaaat acaatcacct tggtcccaga tgttgtttgg tcaattcgct | 600 |
| aacatcgatc aagcaagatg ggtctttact aattcattct ataagttaga ggaagaggta | 660 |
| attgaatgga ctaggaagat ctggaatttg aaagtcattg gtccaacatt gccatcaatg | 720 |
| tatttggaca aaagacttga tgatgataaa gataatggtt tcaatttgta caaggctaat | 780 |
| catcacgaat gtatgaattg gctggatgac aaaccaaagg aatcagttgt atatgttgct | 840 |
| ttcggctctc ttgttaaaca tggtccagaa caagttgagg agattacaag agcacttata | 900 |
| gactctgacg taaacttttt gtgggtcatt aagcacaaag aggaggggaa actgccagaa | 960 |
| aacctttctg aagtgataaa gaccggaaaa ggtctaatcg ttgcttggtg taaacaattg | 1020 |
| gatgttttag ctcatgaatc tgtaggctgt tttgtaacac attgcggatt caactctaca | 1080 |
| ctagaagcca tttccttagg cgtacctgtc gttgcaatgc ctcagttctc cgatcagaca | 1140 |
| accaacgcta aacttttgga cgaaatacta ggggtgggtg tcagagttaa agcagacgag | 1200 |
| aatggtatcg tcagaagagg gaacctagct tcatgtatca aaatgatcat ggaagaggaa | 1260 |
| agaggagtta tcataaggaa aaacgcagtt aagtggaagg atcttgcaaa ggttgccgtc | 1320 |
| catgaaggcg gctcttcaga taatgatatt gttgaatttg tgtccgaact aatcaaagcc | 1380 |
| taa | 1383 |

SEQ ID NO: 4
Stevia rebaudiana

| | |
|---|---|
| MAEQQKIKKS PHVLLIPFPL QGHINPFIQF GKRLISKGVK TTLVTTIHTL NSTLNHSNTT | 60 |
| TTSIEIQAIS DGCDEGGFMS AGESYLETFK QVGSKSLADL IKKLQSEGTT IDAIIYDSMT | 120 |
| EWVLDVAIEF GIDGGSFFTQ ACVVNSLYYH VHKGLISLPL GETVSVPGFP VLQRWETPLI | 180 |
| LQNHEQIQSP WSQMLFGQFA NIDQARWVFT NSFYKLEEEV IEWTRKIWNL KVIGPTLPSM | 240 |
| YLDKRLDDDK DNGFNLYKAN HHECMNWLDD KPKESVVYVA FGSLVKHGPE QVEEITRALI | 300 |
| DSDVNFLWVI KHKEEGKLPE NLSEVIKTGK GLIVAWCKQL DVLAHESVGC FVTHCGFNST | 360 |
| LEAISLGVPV VAMPQFSDQT TNAKLLDEIL GVGVRVKADE NGIVRRGNLA SCIKMIMEEE | 420 |
| RGVIIRKNAV KWKDLAKVAV HEGGSSDNDI VEFVSELIKA | 460 |

SEQ ID NO: 5
Stevia rebaudiana

| | |
|---|---|
| atggatgcaa tggctacaac tgagaagaaa ccacacgtca tcttcatacc atttccagca | 60 |
| caaagccaca ttaaagccat gctcaaacta gcacaacttc tccaccacaa aggactccag | 120 |
| ataaccttcg tcaacaccga cttcatccac aaccagtttc ttgaatcatc gggcccacat | 180 |
| tgtctagacg gtgcaccggg tttccggttc gaaaccattc cggatggtgt ttctcacagt | 240 |
| ccggaagcga gcatcccaat cagagaatca ctcttgagat ccattgaaac caacttcttg | 300 |
| gatcgtttca ttgatcttgt aaccaaactt ccggatcctc cgacttgtat tatctcagat | 360 |
| gggttcttgt cggttttcac aattgacgct gcaaaaaagc ttggaattcc ggtcatgatg | 420 |
| tattggacac ttgctgcctg tgggttcatg ggtttttacc atattcattc tctcattgag | 480 |
| aaaggatttg caccacttaa agatgcaagt tacttgacaa atgggtattt ggacaccgtc | 540 |
| attgattggg ttccgggaat ggaaggcatc cgtctcaagg atttcccgct ggactggagc | 600 |
| actgacctca atgacaaagt tttgatgttc actacggaag ctcctcaaag gtcacacaag | 660 |
| gtttcacatc atattttcca cacgttcgat gagttggagc ctagtattat aaaaactttg | 720 |
| tcattgaggt ataatcacat ttacaccatc ggcccactgc aattacttct tgatcaaata | 780 |
| cccgaagaga aaaagcaaac tggaattacg agtctccatg gatacagttt agtaaaagaa | 840 |
| gaaccagagt gtttccagtg gcttcagtct aaagaaccaa attccgtcgt ttatgtaaat | 900 |
| tttggaagta ctacagtaat gtctttagaa gacatgacgg aatttggttg gggacttgct | 960 |
| aatagcaacc attatttcct ttggatcatc cgatcaaact tggtgatagg ggaaaatgca | 1020 |
| gttttgcccc ctgaacttga ggaacatata aagaaaagag gctttattgc tagctggtgt | 1080 |
| tcacaagaaa aggtcttgaa gcacccttcg gttggagggt tcttgactca ttgtgggtgg | 1140 |
| ggatcgacca tcgagagctt gtctgctggg gtgccaatga tatgctggcc ttattcgtgg | 1200 |
| gaccagctga ccaactgtag gtatatatgc aaagaatggg aggttgggct cgagatggga | 1260 |
| accaaagtga aacgagatga agtcaagagg cttgtacaag agttgatggg agaaggaggt | 1320 |
| cacaaaatga ggaacaaggc taaagattgg aaagaaaagg ctcgcattgc aatagctcct | 1380 |
| aacggttcat cttctttgaa catagacaaa atggtcaagg aaatcaccgt gctagcaaga | 1440 |
| aactagttac aaagttgttt cacattgtgc tttctattta agatgtaact ttgttctaat | 1500 |
| ttaatattgt ctagatgtat tgaaccataa gtttagttgg tctcaggaat tgatttttaa | 1560 |
| tgaaataatg gtcattaggg gtgagt | 1586 |

SEQ ID NO: 6
Artificial Sequence

| | |
|---|---|
| atggatgcaa tggcaactac tgagaaaaag cctcatgtga tcttcattcc atttcctgca | 60 |
| caatctcaca taaaggcaat gctaaagtta gcacaactat tacaccataa gggattacag | 120 |
| ataactttcg tgaataccga cttcatccat aatcaatttc tggaatctag tggccctcat | 180 |
| tgtttggacg gagccccagg gtttagattc gaaacaattc ctgacggtgt ttcacattcc | 240 |
| ccagaggcct ccatcccaat aagagagagt ttactgaggt caatagaaac caactttttg | 300 |
| gatcgtttca ttgacttggt cacaaaactt ccagacccac caacttgcat aatctctgat | 360 |
| ggctttctgt cagtgtttac tatcgacgct gccaaaaagt tgggtatccc agttatgatg | 420 |
| tactggactc ttgctgcatg cggtttcatg ggtttctatc acatccattc tcttatcgaa | 480 |
| aagggttttg ctccactgaa agatgcatca tacttaacca acggctacct ggatactgtt | 540 |
| attgactggg taccaggtat ggaaggtata agacttaaag attttccttt ggattggtct | 600 |
| acagacctta atgataaagt attgatgttt actacagaag ctccacaaag atctcataag | 660 |
| gtttcacatc atatctttca cacctttgat gaattggaac catcaatcat caaaaccttg | 720 |
| tctctaagat acaatcatat ctacactatt ggtccattac aattacttct agatcaaatt | 780 |
| cctgaagaga aaaagcaaac tggtattaca tccttacacg gctactcttt agtgaaagag | 840 |
| gaaccagaat gttttcaatg gctacaaagt aaagagccta attctgtggt ctacgtcaac | 900 |
| ttcggaagta caacagtcat gtccttggaa gatatgactg aatttggttg gggccttgct | 960 |
| aattcaaatc attactttct atggattatc aggtccaatt tggtaatagg ggaaaacgcc | 1020 |
| gtattacctc cagaattgga ggaacacatc aaaaagagag gtttcattgc ttcctggtgt | 1080 |
| tctcaggaaa aggtattgaa acatccttct gttggtggtt tccttactca ttgcggttgg | 1140 |
| ggctctacaa tcgaatcact aagtgcagga gttccaatga tttgttggcc atattcatgg | 1200 |
| gaccaactta caaattgtag gtatatctgt aaagagtggg aagttggatt agaaatggga | 1260 |
| acaaaggtta aacgtgatga agtgaaaaga ttggttcagg agttgatggg ggaaggtggc | 1320 |
| cacaagatga gaaacaaggc caaagattgg aaggaaaaag ccagaattgc tattgctcct | 1380 |
| aacgggtcat cctctctaaa cattgataag atggtcaaag agattacagt cttagccaga | 1440 |
| aactaa | 1446 |

SEQ ID NO: 7
Stevia rebaudiana

| | |
|---|---|
| MDAMATTEKK PHVIFIPFPA QSHIKAMLKL AQLLHHKGLQ ITFVNTDFIH NQFLESSGPH | 60 |
| CLDGAPGFRF ETIPDGVSHS PEASIPIRES LLRSIETNFL DRFIDLVTKL PDPPTCIISD | 120 |
| GFLSVFTIDA AKKLGIPVMM YWTLAACGFM GFYHIHSLIE KGFAPLKDAS YLTNGYLDTV | 180 |
| IDWVPGMEGI RLKDFPLDWS TDLNDKVLMF TTEAPQRSHK VSHHIFHTFD ELEPSIIKTL | 240 |
| SLRYNHIYTI GPLQLLLDQI PEEKKQTGIT SLHGYSLVKE EPECFQWLQS KEPNSVVYVN | 300 |
| FGSTTVMSLE DMTEFGWGLA NSNHYFLWII RSNLVIGENA VLPPELEEHI KKRGFIASWC | 360 |
| SQEKVLKHPS VGGFLTHCGW GSTIESLSAG VPMICWPYSW DQLTNCRYIC KEWEVGLEMG | 420 |
| TKVKRDEVKR LVQELMGEGG HKMRNKAKDW KEKARIAIAP NGSSSLNIDK MVKEITVLAR | 480 |
| N | 481 |

SEQ ID NO: 8
Artificial Sequence

| | |
|---|---|
| atggaaaaca agaccgaaac aacagttaga cgtaggcgta gaatcattct gtttccagta | 60 |
| ccttttcaag ggcacatcaa tccaatacta caactagcca acgttttgta ctctaaaggt | 120 |
| ttttctatta caatctttca caccaatttc aacaaaccaa aaacatccaa ttacccacat | 180 |
| ttcacattca gattcatact tgataatgat ccacaagatg aacgtatttc aaacttacct | 240 |
| acccacggtc ctttagctgg aatgagaatt ccaatcatca atgaacatgg tgccgatgag | 300 |
| cttagaagag aattagagtt acttatgttg gcatccgaag aggacgagga agtctcttgt | 360 |
| ctgattactg acgctctatg gtactttgcc caatctgtgg ctgatagttt gaatttgagg | 420 |
| agattggtac taatgacatc cagtctgttt aactttcacg ctcatgttag tttaccacaa | 480 |
| tttgacgaat tgggatactt ggaccctgat gacaagacta ggttagagga acaggcctct | 540 |
| ggttttccta tgttgaaagt caaagatatc aagtctgcct attctaattg gcaaatcttg | 600 |
| aaagagatct taggaaagat gatcaaacag acaaaggctt catctggagt gatttggaac | 660 |
| agtttcaaag agttagaaga gtctgaattg gagactgtaa tcagagaaat tccagcacct | 720 |
| tcattcctga taccattacc aaaacatttg actgcttcct cttcctcttt gttggatcat | 780 |
| gacagaacag tttttcaatg gttggaccaa caaccaccta gttctgtttt gtacgtgtca | 840 |
| tttggtagta cttctgaagt cgatgaaaag gacttccttg aaatcgcaag aggcttagtc | 900 |
| gatagtaagc agtcattcct ttgggtcgtg cgtccaggtt tcgtgaaagg ctcaacatgg | 960 |
| gtcgaaccac ttccagatgg ttttctaggc gaaagaggta gaatagtcaa atgggttcct | 1020 |
| caacaggaag ttttagctca tggcgctatt ggggcattct ggactcattc cggatggaat | 1080 |
| tcaactttag aatcagtatg cgaaggggta cctatgatct tttcagattt tggtcttgat | 1140 |
| caaccactga acgcaagata catgtctgat gttttgaaag tgggtgtata tctagaaaat | 1200 |
| ggctgggaaa ggggtgaaat agctaatgca ataagacgtg ttatggttga tgaagagggg | 1260 |
| gagtatatca gacaaaacgc aagagtgctg aagcaaaagg ccgacgtttc tctaatgaag | 1320 |
| ggaggctctt catacgaatc cttagaatct cttgtttcct acatttcatc actgtaa | 1377 |

SEQ ID NO: 9
Stevia rebaudiana

| | |
|---|---|
| MENKTETTVR RRRRIILFPV PFQGHINPIL QLANVLYSKG FSITIFHTNF NKPKTSNYPH | 60 |
| FTFRFILDND PQDERISNLP THGPLAGMRI PIINEHGADE LRRELELLML ASEEDEEVSC | 120 |
| LITDALWYFA QSVADSLNLR RLVLMTSSLF NFHAHVSLPQ FDELGYLDPD DKTRLEEQAS | 180 |
| GFPMLKVKDI KSAYSNWQIL KEILGKMIKQ TKASSGVIWN SFKELEESEL ETVIREIPAP | 240 |
| SFLIPLPKHL TASSSSLLDH DRTVFQWLDQ QPPSSVLYVS FGSTSEVDEK DFLEIARGLV | 300 |
| DSKQSFLWVV RPGFVKGSTW VEPLPDGFLG ERGRIVKWVP QQEVLAHGAI GAFWTHSGWN | 360 |
| STLESVCEGV PMIFSDFGLD QPLNARYMSD VLKVGVYLEN GWERGEIANA IRRVMVDEEG | 420 |
| EYIRQNARVL KQKADVSLMK GGSSYESLES LVSYISSL | 458 |

SEQ ID NO: 10
Artificial Sequence

| | |
|---|---|
| atggctacat ctgattctat tgttgatgac aggaagcagt tgcatgtggc tactttccct | 60 |
| tggcttgctt tcggtcatat actgccttac ctacaactat caaaactgat agctgaaaaa | 120 |
| ggacataaag tgtcattcct ttcaacaact agaaacattc aaagattatc ttcccacata | 180 |
| tcaccattga ttaacgtcgt tcaattgaca cttccaagag tacaggaatt accagaagat | 240 |
| gctgaagcta caacagatgt gcatcctgaa gatatccctt acttgaaaaa ggcatccgat | 300 |
| ggattacagc ctgaggtcac tagattcctt gagcaacaca gtccagattg gatcatatac | 360 |
| gactacactc actattggtt gccttcaatt gcagcatcac taggcatttc tagggcacat | 420 |
| ttcagtgtaa ccacaccttg ggccattgct tacatgggtc catccgctga tgctatgatt | 480 |
| aacggcagtg atggtagaac taccgttgaa gatttgacaa ccccaccaaa gtggtttcca | 540 |
| tttccaacta aagtctgttg gagaaaacac gacttagcaa gactggttcc atacaaggca | 600 |
| ccaggaatct cagacggcta tagaatgggt ttagtcctta aagggtctga ctgcctattg | 660 |
| tctaagtgtt accatgagtt tgggacacaa tggctaccac ttttggaaac attacaccaa | 720 |
| gttcctgtcg taccagttgg tctattacct ccagaaatcc ctggtgatga gaaggacgag | 780 |
| acttgggttt caatcaaaaa gtggttagac gggaagcaaa aaggctcagt ggtatatgtg | 840 |
| gcactgggtt ccgaagtttt agtatctcaa acagaagttg tggaacttgc cttaggtttg | 900 |
| gaactatctg gattgccatt tgtctgggcc tacagaaaac caaaaggccc tgcaaagtcc | 960 |
| gattcagttg aattgccaga cggctttgtc gagagaacta gagatagagg gttggtatgg | 1020 |
| acttcatggg ctccacaatt gagaatcctg agtcacgaat ctgtgtgcgg tttcctaaca | 1080 |
| cattgtggtt ctggttctat agttgaagga ctgatgtttg gtcatccact tatcatgttg | 1140 |
| ccaatctttg gtgaccagcc tttgaatgca cgtctgttag aagataaaca agttggaatt | 1200 |
| gaaatcccac gtaatgagga agatggatgt ttaaccaagg agtctgtggc cagatcatta | 1260 |
| cgttccgttg tcgttgaaaa ggaaggcgaa atctacaagg ccaatgcccg tgaactttca | 1320 |
| aagatctaca atgacacaaa agtagagaag gaatatgttt ctcaatttgt agattaccta | 1380 |
| gagaaaaacg ctagagccgt agctattgat catgaatcct aa | 1422 |

SEQ ID NO: 11
Stevia rebaudiana

| | |
|---|---|
| MATSDSIVDD RKQLHVATFP WLAFGHILPY LQLSKLIAEK GHKVSFLSTT RNIQRLSSHI | 60 |
| SPLINVVQLT LPRVQELPED AEATTDVHPE DIPYLKKASD GLQPEVTRFL EQHSPDWIIY | 120 |
| DYTHYWLPSI AASLGISRAH FSVTTPWAIA YMGPSADAMI NGSDGRTTVE DLTTPPKWFP | 180 |
| FPTKVCWRKH DLARLVPYKA PGISDGYRMG LVLKGSDCLL SKCYHEFGTQ WLPLLETLHQ | 240 |
| VPVVPVGLLP PEIPGDEKDE TWVSIKKWLD GKQKGSVVYV ALGSEVLVSQ TEVVELALGL | 300 |
| ELSGLPFVWA YRKPKGPAKS DSVELPDGFV ERTRDRGLVW TSWAPQLRIL SHESVCGFLT | 360 |
| HCGSGSIVEG LMFGHPLIML PIFGDQPLNA RLLEDKQVGI EIPRNEEDGC LTKESVARSL | 420 |
| RSVVVEKEGE IYKANARELS KIYNDTKVEK EYVSQFVDYL EKNARAVAID HES | 473 |

SEQ ID NO: 12
Artificial Sequence

| | |
|---|---|
| atggctactt ctgattccat cgttgacgat agaaagcaat tgcatgttgc tacttttcca | 60 |
| tggttggctt tcggtcatat tttgccatac ttgcaattgt ccaagttgat tgctgaaaag | 120 |
| ggtcacaagg tttcattctt gtctaccacc agaaacatcc aaagattgtc ctctcatatc | 180 |
| tccccattga tcaacgttgt tcaattgact ttgccaagag tccaagaatt gccagaagat | 240 |
| gctgaagcta ctactgatgt tcatccagaa gatatccctt acttgaaaaa ggcttccgat | 300 |
| ggtttacaac cagaagttac tagattcttg gaacaacatt ccccagattg gatcatctac | 360 |
| gattatactc attactggtt gccatccatt gctgcttcat tgggtatttc tagagcccat | 420 |
| ttctctgtta ctactccatg ggctattgct tatatgggtc catctgctga tgctatgatt | 480 |
| aacggttctg atggtagaac taccgttgaa gatttgacta ctccaccaaa gtggtttcca | 540 |
| tttccaacaa aagtctgttg gagaaaacac gatttggcta gattggttcc atacaaagct | 600 |
| ccaggtattt ctgatggtta cagaatgggt atggttttga aaggttccga ttgcttgttg | 660 |
| tctaagtgct atcatgaatt cggtactcaa tggttgcctt tgttggaaac attgcatcaa | 720 |
| gttccagttg ttccagtagg tttgttgcca ccagaaattc caggtgacga aaaagacgaa | 780 |
| acttgggttt ccatcaaaaa gtggttggat ggtaagcaaa agggttctgt tgtttatgtt | 840 |
| gctttgggtt ccgaagcttt ggtttctcaa accgaagttg ttgaattggc tttgggtttg | 900 |
| gaattgtctg gtttgccatt tgtttgggct tacagaaaac ctaaaggtcc agctaagtct | 960 |
| gattctgttg aattgccaga tggtttcgtt gaaagaacta gagatagagg tttggtttgg | 1020 |
| acttcttggg ctccacaatt gagaattttg tctcatgaat ccgtctgtgg tttcttgact | 1080 |
| cattgtggtt ctggttctat cgttgaaggt ttgatgtttg gtcacccatt gattatgttg | 1140 |
| ccaatctttg gtgaccaacc attgaacgct agattattgg aagataagca agtcggtatc | 1200 |
| gaaatcccaa gaaatgaaga agatggttgc ttgaccaaag aatctgttgc tagatctttg | 1260 |
| agatccgttg tcgttgaaaa agaaggtgaa atctacaagg ctaacgctag agaattgtcc | 1320 |
| aagatctaca acgataccaa ggtcgaaaaa gaatacgttt cccaattcgt tgactacttg | 1380 |
| gaaaagaatg ctagagctgt tgccattgat catgaatctt ga | 1422 |

SEQ ID NO: 13
Artificial Sequence

| | |
|---|---|
| MATSDSIVDD RKQLHVATFP WLAFGHILPY LQLSKLIAEK GHKVSFLSTT RNIQRLSSHI | 60 |
| SPLINVVQLT LPRVQELPED AEATTDVHPE DIPYLKKASD GLQPEVTRFL EQHSPDWIIY | 120 |
| DYTHYWLPSI AASLGISRAH FSVTTPWAIA YMGPSADAMI NGSDGRTTVE DLTTPPKWFP | 180 |
| FPTKVCWRKH DLARLVPYKA PGISDGYRMG MVLKGSDCLL SKCYHEFGTQ WLPLLETLHQ | 240 |
| VPVVPVGLLP PEIPGDEKDE TWVSIKKWLD GKQKGSVVYV ALGSEALVSQ TEVVELALGL | 300 |
| ELSGLPFVWA YRKPKGPAKS DSVELPDGFV ERTRDRGLVW TSWAPQLRIL SHESVCGFLT | 360 |
| HCGSGSIVEG LMFGHPLIML PIFGDQPLNA RLLEDKQVGI EIPRNEEDGC LTKESVARSL | 420 |
| RSVVVEKEGE IYKANARELS KIYNDTKVEK EYVSQFVDYL EKNARAVAID HES | 473 |

SEQ ID NO: 14
Oryza sativa

| | |
|---|---|
| atggactccg gctactcctc ctcctacgcc gccgccgccg ggatgcacgt cgtgatctgc | 60 |
| ccgtggctcg ccttcggcca cctgctcccg tgcctcgacc tcgcccagcg cctcgcgtcg | 120 |
| cggggccacc gcgtgtcgtt cgtctccacg ccgcggaaca tatcccgcct cccgccggtg | 180 |
| cgccccgcgc tcgcgccgct cgtcgccttc gtggcgctgc cgctcccgcg cgtcgagggg | 240 |
| ctccccgacg gcgccgagtc caccaacgac gtcccccacg acaggccgga catggtcgag | 300 |
| ctccaccgga gggccttcga cgggctcgcc gcgcccttct cggagttctt gggcaccgcg | 360 |
| tgcgccgact gggtcatcgt cgacgtcttc caccactggg ccgcagccgc cgctctcgag | 420 |
| cacaaggtgc catgtgcaat gatgttgttg ggctctgcac atatgatcgc ttccatagca | 480 |
| gacagacggc tcgagcgcgc ggagacagag tcgcctgcgg ctgccgggca gggacgccca | 540 |
| gcggcggcgc caacgttcga ggtggcgagg atgaagttga tacgaaccaa aggctcatcg | 600 |
| ggaatgtccc tcgccgagcg cttctccttg acgctctcga ggagcagcct cgtcgtcggg | 660 |
| cggagctgcg tggagttcga gccggagacc gtcccgctcc tgtcgacgct ccgcggtaag | 720 |
| cctattacct tccttggcct tatgccgccg ttgcatgaag gccgccgcga ggacggcgag | 780 |
| gatgccaccg tccgctggct cgacgcgcag ccggccaagt ccgtcgtgta cgtcgcgcta | 840 |
| ggcagcgagg tgccactggg agtggagaag gtccacgagc tcgcgctcgg gctggagctc | 900 |
| gccgggacgc gcttcctctg ggctcttagg aagcccactg gcgtctccga cgccgacctc | 960 |
| ctccccgccg gcttcgagga gcgcacgcgc ggccgcggcg tcgtggcgac gagatgggtt | 1020 |
| cctcagatga gcatactggc gcacgccgcc gtgggcgcgt tcctgaccca ctgcggctgg | 1080 |
| aactcgacca tcgaggggct catgttcggc cacccgctta tcatgctgcc gatcttcggc | 1140 |
| gaccagggac cgaacgcgcg gctaatcgag gcgaagaacg ccggattgca ggtggcaaga | 1200 |
| aacgacggcg atggatcgtt cgaccgagaa ggcgtcgcgg cggcgattcg tgcagtcgcg | 1260 |
| gtggaggaag aaagcagcaa agtgtttcaa gccaaagcca agaagctgca ggagatcgtc | 1320 |
| gcggacatgg cctgccatga gaggtacatc gacggattca ttcagcaatt gagatcttac | 1380 |
| aaggattga | 1389 |

SEQ ID NO: 15
Artificial Sequence

| | |
|---|---|
| atggatagtg gctactcctc atcttatgct gctgccgctg gtatgcacgt tgtgatctgc | 60 |
| ccttggttgg cctttggtca cctgttacca tgtctggatt tagcccaaag actggcctca | 120 |
| agaggccata gagtatcatt tgtgtctact cctagaaata tctctcgttt accaccagtc | 180 |
| agacctgctc tagctcctct agttgcattc gttgctcttc cacttccaag agtagaagga | 240 |
| ttgccagacg gcgctgaatc tactaatgac gtaccacatg atagacctga catggtcgaa | 300 |
| ttgcatagaa gagcctttga tggattggca gctccatttt ctgagttcct gggcacagca | 360 |
| tgtgcagact gggttatagt cgatgtattt catcactggg ctgctgcagc cgcattggaa | 420 |
| cataaggtgc cttgtgctat gatgttgtta gggtcagcac acatgatcgc atccatagct | 480 |
| gatagaagat tggaaagagc tgaaacagaa tccccagccg cagcaggaca aggtaggcca | 540 |
| gctgccgccc caacctttga agtggctaga atgaaattga ttcgtactaa aggtagttca | 600 |
| gggatgagtc ttgctgaaag gttttctctg acattatcta gatcatcatt agttgtaggt | 660 |
| agatcctgcg tcgagttcga acctgaaaca gtacctttac tatctacttt gagaggcaaa | 720 |
| cctattactt tccttggtct aatgcctcca ttacatgaag gaaggagaga agatggtgaa | 780 |
| gatgctactg ttaggtggtt agatgcccaa cctgctaagt ctgttgttta cgttgcattg | 840 |
| ggttctgagg taccactagg ggtggaaaag gtgcatgaat tagcattagg acttgagctg | 900 |
| gccggaacaa gattcctttg ggctttgaga aaaccaaccg gtgtttctga cgccgacttg | 960 |
| ctaccagctg ggttcgaaga gagaacaaga ggccgtggtg tcgttgctac tagatgggtc | 1020 |
| ccacaaatga gtattctagc tcatgcagct gtaggggcct ttctaaccca ttgcggttgg | 1080 |
| aactcaacaa tagaaggact gatgtttggt catccactta ttatgttacc aatctttggc | 1140 |
| gatcagggac ctaacgcaag attgattgag gcaaagaacg caggtctgca ggttgcacgt | 1200 |
| aatgatggtg atggttcctt tgatagagaa ggcgttgcag ctgccatcag agcagtcgcc | 1260 |
| gttgaggaag agtcatctaa agttttccaa gctaaggcca aaaaattaca agagattgtg | 1320 |
| gctgacatgg cttgtcacga aagatacatc gatggtttca tccaacaatt gagaagttat | 1380 |
| aaagactaa | 1389 |

SEQ ID NO: 16
Oryza sativa

| | |
|---|---|
| MDSGYSSSYA AAAGMHVVIC PWLAFGHLLP CLDLAQRLAS RGHRVSFVST PRNISRLPPV | 60 |
| RPALAPLVAF VALPLPRVEG LPDGAESTND VPHDRPDMVE LHRRAFDGLA APFSEFLGTA | 120 |
| CADWVIVDVF HHWAAAAALE HKVPCAMMLL GSAHMIASIA DRRLERAETE SPAAAGQGRP | 180 |
| AAAPTFEVAR MKLIRTKGSS GMSLAERFSL TLSRSSLVVG RSCVEFEPET VPLLSTLRGK | 240 |
| PITFLGLMPP LHEGRREDGE DATVRWLDAQ PAKSVVYVAL GSEVPLGVEK VHELALGLEL | 300 |
| AGTRFLWALR KPTGVSDADL LPAGFEERTR GRGVVATRWV PQMSILAHAA VGAFLTHCGW | 360 |
| NSTIEGLMFG HPLIMLPIFG DQGPNARLIE AKNAGLQVAR NDGDGSFDRE GVAAAIRAVA | 420 |
| VEEESSKVFQ AKAKKLQEIV ADMACHERYI DGFIQQLRSY KD | 462 |

SEQ ID NO: 17
Artificial Sequence

| | |
|---|---|
| MDSGYSSSYA AAAGMHVVIC PWLAFGHLLP CLDLAQRLAS RGHRVSFVST PRNISRLPPV | 60 |
| RPALAPLVAF VALPLPRVEG LPDGAESTND VPHDRPDMVE LHRRAFDGLA APFSEFLGTA | 120 |
| CADWVIVDVF HHWAAAAALE HKVPCAMMLL GSAHMIASIA DRRLERAETE SPAAAGQGRP | 180 |
| AAAPTFEVAR MKLIRTKGSS GMSLAERFSL TLSRSSLVVG RSCVEFEPET VPLLSTLRGK | 240 |
| PITFLGLLPP EIPGDEKDET WVSIKKWLDG KQKGSVVYVA LGSEALVSQT EVVELALGLE | 300 |
| LSGLPFVWAY RKPKGPAKSD SVELPDGFVE RTRDRGLVWT SWAPQLRILS HESVCGFLTH | 360 |
| CGSGSIVEGL MFGHPLIMLP IFGDQPLNAR LLEDKQVGIE IARNDGDGSF DREGVAAAIR | 420 |
| AVAVEEESSK VFQAKAKKLQ EIVADMACHE RYIDGFIQQL RSYKD | 465 |

SEQ ID NO: 18
Artificial Sequence

| | |
|---|---|
| MATSDSIVDD RKQLHVATFP WLAFGHILPY LQLSKLIAEK GHKVSFLSTT RNIQRLSSHI | 60 |
| SPLINVVQLT LPRVQELPED AEATTDVHPE DIPYLKKASD GLQPEVTRFL EQHSPDWIIY | 120 |
| DYTHYWLPSI AASLGISRAH FSVTTPWAIA YMGPSADAMI NGSDGRTTVE DLTTPPKWFP | 180 |
| FPTKVCWRKH DLARLVPYKA PGISDGYRMG MVLKGSDCLL SKCYHEFGTQ WLPLLETLHQ | 240 |
| VPVVPVGLMP PLHEGRREDG EDATVRWLDA QPAKSVVYVA LGSEVPLGVE KVHELALGLE | 300 |
| LAGTRFLWAL RKPTGVSDAD LLPAGFEERT RGRGVVATRW VPQMSILAHA AVGAFLTHCG | 360 |
| WNSTIEGLMF GHPLIMLPIF GDQGPNARLI EAKNAGLQVP RNEEDGCLTK ESVARSLRSV | 420 |
| VVEKEGEIYK ANARELSKIY NDTKVEKEYV SQFVDYLEKN ARAVAIDHES | 470 |

SEQ ID NO: 19
Artificial Sequence

| | |
|---|---|
| atggctttgg taaacccaac cgctcttttc tatggtacct ctatcagaac aagacctaca | 60 |
| aacttactaa atccaactca aaagctaaga ccagtttcat catcttcctt accttctttc | 120 |
| tcatcagtta gtgcgattct tactgaaaaa catcaatcta atccttctga gaacaacaat | 180 |
| ttgcaaactc atctagaaac tcctttcaac tttgatagtt atatgttgga aaaagtcaac | 240 |
| atggttaacg aggcgcttga tgcatctgtc ccactaaaag acccaatcaa aatccatgaa | 300 |
| tccatgagat actctttatt ggcaggcggt aagagaatca gaccaatgat gtgtattgca | 360 |
| gcctgcgaaa tagtcggagg taatatcctt aacgccatgc cagccgcatg tgccgtggaa | 420 |
| atgattcata ctatgtcttt ggtgcatgac gatcttccat gtatggataa tgatgacttc | 480 |
| agaagaggta aacctatttc acacaaggtc tacggggagg aaatggcagt attgaccggc | 540 |
| gatgctttac taagtttatc tttcgaacat atagctactg ctacaaaggg tgtatcaaag | 600 |
| gatagaatcg tcagagctat aggggagttg gcccgttcag ttggctccga aggtttagtg | 660 |
| gctggacaag ttgtagatat cttgtcagag ggtgctgatg ttggattaga tcacctagaa | 720 |
| tacattcaca tccacaaaac agcaatgttg cttgagtcct cagtagttat tggcgctatc | 780 |
| atgggaggag gatctgatca gcagatcgaa aagttgagaa aattcgctag atctattggt | 840 |
| ctactattcc aagttgtgga tgacattttg gatgttacaa aatctaccga agagttgggg | 900 |
| aaaacagctg gtaaggattt gttgacagat aagacaactt acccaaagtt gttaggtata | 960 |
| gaaaagtcca gagaatttgc cgaaaaactt aacaaggaag cacaagagca attaagtggc | 1020 |
| tttgatagac gtaaggcagc tcctttgatc gcgttagcca actacaatgc gtaccgtcaa | 1080 |
| aattga | 1086 |

SEQ ID NO: 20
Stevia rebaudiana

| | |
|---|---|
| MALVNPTALF YGTSIRTRPT NLLNPTQKLR PVSSSSLPSF SSVSAILTEK HQSNPSENNN | 60 |
| LQTHLETPFN FDSYMLEKVN MVNEALDASV PLKDPIKIHE SMRYSLLAGG KRIRPMMCIA | 120 |
| ACEIVGGNIL NAMPAACAVE MIHTMSLVHD DLPCMDNDDF RRGKPISHKV YGEEMAVLTG | 180 |
| DALLSLSFEH IATATKGVSK DRIVRAIGEL ARSVGSEGLV AGQVVDILSE GADVGLDHLE | 240 |
| YIHIHKTAML LESSVVIGAI MGGGSDQQIE KLRKFARSIG LLFQVVDDIL DVTKSTEELG | 300 |
| KTAGKDLLTD KTTYPKLLGI EKSREFAEKL NKEAQEQLSG FDRRKAAPLI ALANYNAYRQ | 360 |
| N | 361 |

SEQ ID NO: 21
Artificial Sequence

| | |
|---|---|
| atggctgagc aacaaatatc taacttgctg tctatgtttg atgcttcaca tgctagtcag | 60 |
| aaattagaaa ttactgtcca aatgatggac acataccatt acagagaaac gcctccagat | 120 |
| tcctcatctt ctgaaggcgg ttcattgtct agatacgacg agagaagagt ctctttgcct | 180 |
| ctcagtcata atgctgcctc tccagatatt gtatcacaac tatgtttttc cactgcaatg | 240 |
| tcttcagagt tgaatcacag atggaaatct caaagattaa aggtggccga ttctccttac | 300 |
| aactatatcc taacattacc atcaaaagga attagaggtg cctttatcga ttccctgaac | 360 |
| gtatggttgg aggttccaga ggatgaaaca tcagtcatca aggaagttat tggtatgctc | 420 |
| cacaactctt cattaatcat tgatgacttc caagataatt ctccacttag aagaggaaag | 480 |
| ccatctaccc atacagtctt cggccctgcc caggctatca atactgctac ttacgttata | 540 |
| gttaaagcaa tcgaaaagat acaagacata gtgggacacg atgcattggc agatgttacg | 600 |
| ggtactatta caactatttt ccaaggtcag gccatggact tgtggtggac agcaaatgca | 660 |
| atcgttccat caatacagga atacttactt atggtaaacg ataaaaccgg tgctctcttt | 720 |
| agactgagtt tggagttgtt agctctgaat tccgaagcca gtatttctga ctctgcttta | 780 |
| gaaagtttat ctagtgctgt ttccttgcta ggtcaatact tccaaatcag agacgactat | 840 |
| atgaacttga tcgataacaa gtatacagat cagaaaggct tctgcgaaga tcttgatgaa | 900 |
| ggcaagtact cactaacact tattcatgcc ctccaaactg attcatccga tctactgacc | 960 |
| aacatccttt caatgagaag agtgcaagga aagttaacgg cacaaaagag atgttggttc | 1020 |
| tggaaatga | 1029 |

SEQ ID NO: 22
Gibberella fujikuroi

| | |
|---|---|
| MAEQQISNLL SMFDASHASQ KLEITVQMMD TYHYRETPPD SSSSEGGSLS RYDERRVSLP | 60 |
| LSHNAASPDI VSQLCFSTAM SSELNHRWKS QRLKVADSPY NYILTLPSKG IRGAFIDSLN | 120 |
| VWLEVPEDET SVIKEVIGML HNSSLIIDDF QDNSPLRRGK PSTHTVFGPA QAINTATYVI | 180 |
| VKAIEKIQDI VGHDALADVT GTITTIFQGQ AMDLWWTANA IVPSIQEYLL MVNDKTGALF | 240 |
| RLSLELLALN SEASISDSAL ESLSSAVSLL GQYFQIRDDY MNLIDNKYTD QKGFCEDLDE | 300 |
| GKYSLTLIHA LQTDSSDLLT NILSMRRVQG KLTAQKRCWF WK | 342 |

SEQ ID NO: 23
Artificial Sequence

| | |
|---|---|
| atggaaaaga ctaaggagaa agcagaacgt atcttgctgg agccatacag atacttatta | 60 |
| caactaccag gaaagcaagt ccgttctaaa ctatcacaag cgttcaatca ctggttaaaa | 120 |
| gttcctgaag ataagttaca aatcattatt gaagtcacag aaatgctaca caatgcttct | 180 |
| ttactgatcg atgatataga ggattcttcc aaactgagaa gaggttttcc tgtcgctcat | 240 |
| tccatatacg gggtaccaag tgtaatcaac tcagctaatt acgtctactt cttgggattg | 300 |
| gaaaaagtat tgacattaga tcatccagac gctgtaaagc tattcaccag acaacttctt | 360 |
| gaattgcatc aaggtcaagg tttggatatc tattggagag acacttatac ttgcccaaca | 420 |
| gaagaggagt acaaagcaat ggttctacaa aagactggcg gtttgttcgg acttgccgtt | 480 |
| ggtctgatgc aacttttctc tgattacaag gaggacttaa agcctctgtt ggataccttg | 540 |
| ggcttgtttt tccagattag agatgactac gctaacttac attcaaagga atattcagaa | 600 |
| aacaaatcat tctgtgaaga tttgactgaa gggaagttta gttttccaac aatccacgcc | 660 |
| atttggtcaa gaccagaatc tactcaagtg caaaacattc tgcgtcagag aacagagaat | 720 |
| attgacatca aaaagtattg tgttcagtac ttggaagatg ttggttcttt tgcttacaca | 780 |
| agacatacac ttagagaatt agaggcaaaa gcatacaagc aaatagaagc ctgtggaggc | 840 |
| aatccttctc tagtggcatt ggttaaacat ttgtccaaaa tgttcaccga ggaaaacaag | 900 |
| taa | 903 |

SEQ ID NO: 24
Mus musculus

| | |
|---|---|
| MEKTKEKAER ILLEPYRYLL QLPGKQVRSK LSQAFNHWLK VPEDKLQIII EVTEMLHNAS | 60 |
| LLIDDIEDSS KLRRGFPVAH SIYGVPSVIN SANYVYFLGL EKVLTLDHPD AVKLFTRQLL | 120 |
| ELHQGQGLDI YWRDTYTCPT EEEYKAMVLQ KTGGLFGLAV GLMQLFSDYK EDLKPLLDTL | 180 |
| GLFFQIRDDY ANLHSKEYSE NKSFCEDLTE GKFSFPTIHA IWSRPESTQV QNILRQRTEN | 240 |
| IDIKKYCVQY LEDVGSFAYT RHTLRELEAK AYKQIEACGG NPSLVALVKH LSKMFTEENK | 300 |

SEQ ID NO: 25
Artificial Sequence

| | |
|---|---|
| atggcaagat tctattttct taacgcacta ttgatggtta tctcattaca atcaactaca | 60 |
| gccttcactc cagctaaact tgcttatcca acaacaacaa cagctctaaa tgtcgcctcc | 120 |
| gccgaaactt ctttcagtct agatgaatac ttggcctcta agataggacc tatagagtct | 180 |
| gccttggaag catcagtcaa atccagaatt ccacagaccg ataagatctg cgaatctatg | 240 |
| gcctactctt tgatggcagg aggcaagaga attagaccag tgttgtgtat cgctgcatgt | 300 |
| gagatgttcg gtggatccca agatgtcgct atgcctactg ctgtggcatt agaaatgata | 360 |
| cacacaatgt ctttgattca tgatgatttg ccatccatgg ataacgatga cttgagaaga | 420 |
| ggtaaaccaa caaaccatgt cgttttcggc gaagatgtag ctattcttgc aggtgactct | 480 |
| ttattgtcaa cttccttcga gcacgtcgct agagaaacaa aaggagtgtc agcagaaaag | 540 |
| atcgtggatg ttatcgctag attaggcaaa tctgttggtg ccgagggcct tgctggcggt | 600 |
| caagttatgg acttagaatg tgaagctaaa ccaggtacca cattagacga cttgaaatgg | 660 |
| attcatatcc ataaaaccgc tacattgtta caagttgctg tagcttctgg tgcagttcta | 720 |
| ggtggtgcaa ctcctgaaga ggttgctgca tgcgagttgt ttgctatgaa tataggtctt | 780 |
| gcctttcaag ttgccgacga tatccttgat gtaaccgctt catcagaaga tttgggtaaa | 840 |
| actgcaggca aagatgaagc tactgataag acaacttacc caaagttatt aggattagaa | 900 |
| gagagtaagg catacgcaag acaactaatc gatgaagcca aggaaagttt ggctcctttt | 960 |
| ggagatagag ctgccccttt attggccatt gcagatttca ttattgatag aaagaattga | 1020 |

SEQ ID NO: 26
Thalassiosira pseudonana

| | |
|---|---|
| MARFYFLNAL LMVISLQSTT AFTPAKLAYP TTTTALNVAS AETSFSLDEY LASKIGPIES | 60 |
| ALEASVKSRI PQTDKICESM AYSLMAGGKR IRPVLCIAAC EMFGGSQDVA MPTAVALEMI | 120 |
| HTMSLIHDDL PSMDNDDLRR GKPTNHVVFG EDVAILAGDS LLSTSFEHVA RETKGVSAEK | 180 |
| IVDVIARLGK SVGAEGLAGG QVMDLECEAK PGTTLDDLKW IHIHKTATLL QVAVASGAVL | 240 |
| GGATPEEVAA CELFAMNIGL AFQVADDILD VTASSEDLGK TAGKDEATDK TTYPKLLGLE | 300 |
| ESKAYARQLI DEAKESLAPF GDRAAPLLAI ADFIIDRKN | 339 |

SEQ ID NO: 27
Artificial Sequence

| | |
|---|---|
| atgcacttag caccacgtag agtccctaga ggtagaagat caccacctga cagagttcct | 60 |
| gaaagacaag gtgccttggg tagaagacgt ggagctggct ctactggctg tgcccgtgct | 120 |
| gctgctggtg ttcaccgtag aagaggagga ggcgaggctg atccatcagc tgctgtgcat | 180 |
| agaggctggc aagccggtgg tggcaccggt ttgcctgatg aggtggtgtc taccgcagcc | 240 |
| gccttagaaa tgtttcatgc ttttgcttta atccatgatg atatcatgga tgatagtgca | 300 |
| actagaagag gctccccaac tgttcacaga gccctagctg atcgtttagg cgctgctctg | 360 |
| gacccagatc aggccggtca actaggagtt tctactgcta tcttggttgg agatctggct | 420 |
| ttgacatggt ccgatgaatt gttatacgct ccattgactc cacatagact ggcagcagta | 480 |
| ctaccattgg taacagctat gagagctgaa accgttcatg gccaatatct tgatataact | 540 |
| agtgctagaa gacctgggac cgatacttct cttgcattga gaatagccag atataagaca | 600 |
| gcagcttaca caatggaacg tccactgcac attggtgcag ccctggctgg ggcaagacca | 660 |
| gaactattag cagggctttc agcatacgcc ttgccagctg gagaagcctt ccaattggca | 720 |
| gatgacctgc taggcgtctt cggtgatcca agacgtacag ggaaacctga cctagatgat | 780 |
| cttagaggtg gaaagcatac tgtcttagtc gccttggcaa gagaacatgc cactccagaa | 840 |
| cagagacaca cattggatac attattgggt acaccaggtc ttgatagaca aggcgcttca | 900 |
| agactaagat gcgtattggt agcaactggt gcaagagccg aagccgaaag acttattaca | 960 |
| gagagaagag atcaagcatt aactgcattg aacgcattaa cactgccacc tcctttagct | 1020 |
| gaggcattag caagattgac attagggtct acagctcatc ctgcctaa | 1068 |

SEQ ID NO: 28
Streptomyces clavuligerus

| | |
|---|---|
| MHLAPRRVPR GRRSPPDRVP ERQGALGRRR GAGSTGCARA AAGVHRRRGG GEADPSAAVH | 60 |
| RGWQAGGGTG LPDEVVSTAA ALEMFHAFAL IHDDIMDDSA TRRGSPTVHR ALADRLGAAL | 120 |
| DPDQAGQLGV STAILVGDLA LTWSDELLYA PLTPHRLAAV LPLVTAMRAE TVHGQYLDIT | 180 |
| SARRPGTDTS LALRIARYKT AAYTMERPLH IGAALAGARP ELLAGLSAYA LPAGEAFQLA | 240 |
| DDLLGVFGDP RRTGKPDLDD LRGGKHTVLV ALAREHATPE QRHTLDTLLG TPGLDRQGAS | 300 |
| RLRCVLVATG ARAEAERLIT ERRDQALTAL NALTLPPPLA EALARLTLGS TAHPA | 355 |

SEQ ID NO: 29
Artificial Sequence

| | |
|---|---|
| atgtcatatt tcgataacta cttcaatgag atagttaatt ccgtgaacga catcattaag | 60 |
| tcttacatct ctggcgacgt accaaaacta tacgaagcct cctaccattt gtttacatca | 120 |
| ggaggaaaga gactaagacc attgatcctt acaatttctt ctgatctttt cggtggacag | 180 |
| agagaaagag catactatgc tggcgcagca atcgaagttt tgcacacatt cactttggtt | 240 |
| cacgatgata tcatggatca agataacatt cgtagaggtc ttcctactgt acatgtcaag | 300 |
| tatggcctac ctttggccat tttagctggt gacttattgc atgcaaaagc ctttcaattg | 360 |
| ttgactcagg cattgagagg tctaccatct gaaactatca tcaaggcgtt tgatatcttt | 420 |
| acaagatcta tcattatcat atcagaaggt caagctgtcg atatggaatt cgaagataga | 480 |
| attgatatca aggaacaaga gtatttggat atgatatctc gtaaaaccgc tgccttattc | 540 |
| tcagcttctt cttccattgg ggcgttgata gctggagcta atgataacga tgtgagatta | 600 |
| atgtccgatt tcggtacaaa tcttgggatc gcatttcaaa ttgtagatga tatacttggt | 660 |
| ttaacagctg atgaaaaaga gctaggaaaa cctgttttca gtgatatcag agaaggtaaa | 720 |
| aagaccatat tagtcattaa gactttagaa ttgtgtaagg aagacgagaa aaagattgtg | 780 |
| ttaaaagcgc taggcaacaa gtcagcatca aaggaagagt tgatgagttc tgctgacata | 840 |
| atcaaaaagt actcattgga ttacgcctac aacttagctg agaaatacta caaaaacgcc | 900 |
| atcgattctc taaatcaagt ttcaagtaaa agtgatattc cagggaaggc attgaaatat | 960 |
| cttgctgaat tcaccatcag aagacgtaag taa | 993 |

SEQ ID NO: 30
Sulfolobus acidocaldarius

| | |
|---|---|
| MSYFDNYFNE IVNSVNDIIK SYISGDVPKL YEASYHLFTS GGKRLRPLIL TISSDLFGGQ | 60 |
| RERAYYAGAA IEVLHTFTLV HDDIMDQDNI RRGLPTVHVK YGLPLAILAG DLLHAKAFQL | 120 |
| LTQALRGLPS ETIIKAFDIF TRSIIIISEG QAVDMEFEDR IDIKEQEYLD MISRKTAALF | 180 |
| SASSSIGALI AGANDNDVRL MSDFGTNLGI AFQIVDDILG LTADEKELGK PVFSDIREGK | 240 |
| KTILVIKTLE LCKEDEKKIV LKALGNKSAS KEELMSSADI IKKYSLDYAY NLAEKYYKNA | 300 |
| IDSLNQVSSK SDIPGKALKY LAEFTIRRRK | 330 |

SEQ ID NO: 31
Artificial Sequence

| | |
|---|---|
| atggtcgcac aaactttcaa cctggatacc tacttatccc aaagacaaca acaagttgaa | 60 |
| gaggccctaa gtgctgctct tgtgccagct tatcctgaga gaatatacga agctatgaga | 120 |
| tactccctcc tggcaggtgg caaaagatta agacctatct tatgtttagc tgcttgcgaa | 180 |
| ttggcaggtg gttctgttga acaagccatg ccaactgcgt gtgcacttga aatgatccat | 240 |
| acaatgtcac taattcatga tgacctgcca gccatggata acgatgattt cagaagagga | 300 |
| aagccaacta atcacaaggt gttcggggaa gatatagcca tcttagcggg tgatgcgctt | 360 |
| ttagcttacg cttttgaaca tattgcttct caaacaagag gagtaccacc tcaattggtg | 420 |
| ctacaagtta ttgctagaat cggacacgcc gttgctgcaa caggcctcgt tggaggccaa | 480 |
| gtcgtagacc ttgaatctga aggtaaagct atttccttag aaacattgga gtatattcac | 540 |
| tcacataaga ctggagcctt gctggaagca tcagttgtct caggcggtat tctcgcaggg | 600 |
| gcagatgaag agcttttggc cagattgtct cattacgcta gagatatagg cttggctttt | 660 |
| caaatcgtcg atgatatcct ggatgttact gctacatctg aacagttggg gaaaaccgct | 720 |
| ggtaaagacc aggcagccgc aaaggcaact tatccaagtc tattgggttt agaagcctct | 780 |
| agacagaaag cggaagagtt gattcaatct gctaaggaag ccttaagacc ttacggttca | 840 |
| caagcagagc cactcctagc gctggcagac ttcatcacac gtcgtcagca ttaa | 894 |

SEQ ID NO: 32
Synechococcus sp.

| | |
|---|---|
| MVAQTFNLDT YLSQRQQQVE EALSAALVPA YPERIYEAMR YSLLAGGKRL RPILCLAACE | 60 |
| LAGGSVEQAM PTACALEMIH TMSLIHDDLP AMDNDDFRRG KPTNHKVFGE DIAILAGDAL | 120 |
| LAYAFEHIAS QTRGVPPQLV LQVIARIGHA VAATGLVGGQ VVDLESEGKA ISLETLEYIH | 180 |
| SHKTGALLEA SVVSGGILAG ADEELLARLS HYARDIGLAF QIVDDILDVT ATSEQLGKTA | 240 |
| GKDQAAAKAT YPSLLGLEAS RQKAEELIQS AKEALRPYGS QAEPLLALAD FITRRQH | 297 |

SEQ ID NO: 33
Artificial Sequence

| | |
|---|---|
| atgaaaaccg ggtttatctc accagcaaca gtatttcatc acagaatctc accagcgacc | 60 |
| actttcagac atcacttatc acctgctact acaaactcta caggcattgt cgccttaaga | 120 |
| gacatcaact tcagatgtaa agcagtttct aaagagtact ctgatctgtt gcagaaagat | 180 |
| gaggcttctt tcacaaaatg ggacgatgac aaggtgaaag atcatcttga taccaacaaa | 240 |
| aacttatacc caaatgatga gattaaggaa tttgttgaat cagtaaaggc tatgttcggt | 300 |
| agtatgaatg acggggagat aaacgtctct gcatacgata ctgcatgggt tgctttggtt | 360 |
| caagatgtcg atggatcagg tagtcctcag ttcccttctt ctttagaatg gattgccaac | 420 |
| aatcaattgt cagatggatc atggggagat catttgctgt tctcagctca cgatagaatc | 480 |
| atcaacacat tagcatgcgt tattgcactt acaagttgga atgttcatcc ttctaagtgt | 540 |
| gaaaaaggtt tgaattttct gagagaaaac atttgcaaat tagaagatga aaacgcagaa | 600 |
| catatgccaa ttggttttga agtaacattc ccatcactaa ttgatatcgc gaaaaagttg | 660 |
| aacattgaag tacctgagga tactccagca cttaaagaga tctacgcacg tagagatatc | 720 |
| aagttaacta agatcccaat ggaagttctt cacaaggtac ctactacttt gttacattct | 780 |
| ttggaaggaa tgcctgattt ggagtgggaa aaactgttaa agctacaatg taaagatggt | 840 |
| agtttcttgt tttccccatc tagtaccgca ttcgccctaa tgcaaacaaa agatgagaaa | 900 |
| tgcttacagt atctaacaaa tatcgtcact aagttcaacg gtggcgtgcc taatgtgtac | 960 |
| ccagtcgatt tgtttgaaca tatttgggtt gttgatagac tgcagagatt ggggattgcc | 1020 |
| agatacttca aatcagagat aaaagattgt gtagagtata tcaataagta ctggaccaaa | 1080 |
| aatggaattt gttgggctag aaatactcac gttcaagata tcgatgatac agccatggga | 1140 |
| ttcagagtgt tgagagcgca cggttatgac gtcactccag atgtttttag acaatttgaa | 1200 |
| aaagatggta aattcgtttg ctttgcaggg caatcaacac aagccgtgac aggaatgttt | 1260 |
| aacgtttaca gagcctctca aatgttgttc ccaggggaga gaattttgga agatgccaaa | 1320 |
| aagttctctt acaattactt aaaggaaaag caaagtacca acgaattgct ggataaatgg | 1380 |
| ataatcgcta aagatctacc tggtgaagtt ggttatgctc tggatatccc atggtatgct | 1440 |
| tccttaccaa gattggaaac tcgttattac cttgaacaat acggcggtga agatgatgtc | 1500 |
| tggataggca agacattata cagaatgggt tacgtgtcca ataacacata tctagaaatg | 1560 |
| gcaaagctgg attacaataa ctatgttgca gtccttcaat tagaatggta cacaatacaa | 1620 |
| caatggtacg tcgatattgg tatagagaag ttcgaatctg acaacatcaa gtcagtcctg | 1680 |

SEQ ID NO: 34
Stevia rebaudiana

| | |
|---|---|
| MKTGFISPAT VFHHRISPAT TFRHHLSPAT TNSTGIVALR DINFRCKAVS KEYSDLLQKD | 60 |
| EASFTKWDDD KVKDHLDTNK NLYPNDEIKE FVESVKAMFG SMNDGEINVS AYDTAWVALV | 120 |
| QDVDGSGSPQ FPSSLEWIAN NQLSDGSWGD HLLFSAHDRI INTLACVIAL TSWNVHPSKC | 180 |
| EKGLNFLREN ICKLEDENAE HMPIGFEVTF PSLIDIAKKL NIEVPEDTPA LKEIYARRDI | 240 |
| KLTKIPMEVL HKVPTTLLHS LEGMPDLEWE KLLKLQCKDG SFLFSPSSTA FALMQTKDEK | 300 |
| CLQYLTNIVT KFNGGVPNVY PVDLFEHIWV VDRLQRLGIA RYFKSEIKDC VEYINKYWTK | 360 |
| NGICWARNTH VQDIDDTAMG FRVLRAHGYD VTPDVFRQFE KDGKFVCFAG QSTQAVTGMF | 420 |
| NVYRASQMLF PGERILEDAK KFSYNYLKEK QSTNELLDKW IIAKDLPGEV GYALDIPWYA | 480 |
| SLPRLETRYY LEQYGGEDDV WIGKTLYRMG YVSNNTYLEM AKLDYNNYVA VLQLEWYTIQ | 540 |
| QWYVDIGIEK FESDNIKSVL VSYYLAAASI FEPERSKERI AWAKTTILVD KITSIFDSSQ | 600 |
| SSKEDITAFI DKFRNKSSSK KHSINGEPWH EVMVALKKTL HGFALDALMT HSQDIHPQLH | 660 |
| QAWEMWLTKL QDGVDVTAEL MVQMINMTAG RWVSKELLTH PQYQRLSTVT NSVCHDITKL | 720 |
| HNFKENSTTV DSKVQELVQL VFSDTPDDLD QDMKQTFLTV MKTFYYKAWC DPNTINDHIS | 780 |
| KVFEIVI | 787 |

SEQ ID NO: 35
Artificial Sequence

| | |
|---|---|
| atgcctgatg cacacgatgc tccacctcca caaataagac agagaacact agtagatgag | 60 |
| gctacccaac tgctaactga gtccgcagaa gatgcatggg gtgaagtcag tgtgtcagaa | 120 |
| tacgaaacag caaggctagt tgcccatgct acatggttag gtggacacgc cacaagagtg | 180 |
| gccttccttc tggagagaca acacgaagac gggtcatggg gtccaccagg tggatatagg | 240 |
| ttagtcccta cattatctgc tgttcacgca ttattgacat gtcttgcctc tcctgctcag | 300 |
| gatcatggcg ttccacatga tagactttta agagctgttg acgcaggctt gactgccttg | 360 |
| agaagattgg ggacatctga ctccccacct gatactatag cagttgagct ggttatccca | 420 |
| tctttgctag agggcattca acacttactg gaccctgctc atcctcatag tagaccagcc | 480 |
| ttctctcaac atagaggctc tcttgtttgt cctggtggac tagatgggag aactctagga | 540 |
| gctttgagat cacacgccgc agcaggtaca ccagtaccag gaaaagtctg gcacgcttcc | 600 |
| gagactttgg gcttgagtac cgaagctgct tctcacttgc aaccagccca aggtataatc | 660 |
| ggtggctctg ctgctgccac agcaacatgg ctaaccaggg ttgcaccatc tcaacagtca | 720 |
| gattctgcca gaagatacct tgaggaatta caacacagat actctggccc agttccttcc | 780 |
| attaccccta tcacatactt cgaaagagca tggttattga acaattttgc agcagccggt | 840 |
| gttccttgtg aggctccagc tgctttgttg gattccttag aagcagcact tacaccacaa | 900 |
| ggtgctcctg ctggagcagg attgcctcca gatgctgatg atacagccgc tgtgttgctt | 960 |
| gcattggcaa cacatgggag aggtagaaga ccagaagtac tgatggatta caggactgac | 1020 |
| gggtatttcc aatgctttat tggggaaagg actccatcaa tttcaacaaa cgctcacgta | 1080 |
| ttggaaacat tagggcatca tgtggcccaa catccacaag atagagccag atacggatca | 1140 |
| gccatggata ccgcatcagc ttggctgctg gcagctcaaa agcaagatgg ctcttggtta | 1200 |
| gataaatggc atgcctcacc atactacgct actgtttgtt gcacacaagc cctagccgct | 1260 |
| catgcaagtc ctgcaactgc accagctaga cagagagctg tcagatgggt tttagccaca | 1320 |
| caaagatccg atggcggttg gggtctatgg cattcaactg ttgaagagac tgcttatgcc | 1380 |
| ttacagatct tggccccacc ttctggtggt ggcaatatcc cagtccaaca agcacttact | 1440 |
| agaggcagag caagattgtg tggagccttg ccactgactc ctttatggca tgataaggat | 1500 |
| ttgtatactc cagtaagagt agtcagagct gccagagctg ctgctctgta cactaccaga | 1560 |
| gatctattgt taccaccatt gtaa | 1584 |

SEQ ID NO: 36
Streptomyces clavuligerus

| | |
|---|---|
| MPDAHDAPPP QIRQRTLVDE ATQLLTESAE DAWGEVSVSE YETARLVAHA TWLGGHATRV | 60 |
| AFLLERQHED GSWGPPGGYR LVPTLSAVHA LLTCLASPAQ DHGVPHDRLL RAVDAGLTAL | 120 |
| RRLGTSDSPP DTIAVELVIP SLLEGIQHLL DPAHPHSRPA FSQHRGSLVC PGGLDGRTLG | 180 |
| ALRSHAAAGT PVPGKVWHAS ETLGLSTEAA SHLQPAQGII GGSAAATATW LTRVAPSQQS | 240 |
| DSARRYLEEL QHRYSGPVPS ITPITYFERA WLLNNFAAAG VPCEAPAALL DSLEAALTPQ | 300 |
| GAPAGAGLPP DADDTAAVLL ALATHGRGRR PEVLMDYRTD GYFQCFIGER TPSISTNAHV | 360 |
| LETLGHHVAQ HPQDRARYGS AMDTASAWLL AAQKQDGSWL DKWHASPYYA TVCCTQALAA | 420 |
| HASPATAPAR QRAVRWVLAT QRSDGGWGLW HSTVEETAYA LQILAPPSGG GNIPVQQALT | 480 |
| RGRARLCGAL PLTPLWHDKD LYTPVRVVRA ARAAALYTTR DLLLPPL | 527 |

SEQ ID NO: 37
Artificial Sequence

| | |
|---|---|
| atgaacgccc tatccgaaca cattttgtct gaattgagaa gattattgtc tgaaatgagt | 60 |
| gatggcggat ctgttggtcc atctgtgtat gatacggccc aggccctaag attccacggt | 120 |
| aacgtaacag gtagacaaga tgcatatgct tggttgatcg cccagcaaca agcagatgga | 180 |
| ggttggggct ctgccgactt tccactcttt agacatgctc caacatgggc tgcacttctc | 240 |
| gcattacaaa gagctgatcc acttcctggc gcagcagacg cagttcagac cgcaacaaga | 300 |
| ttcttgcaaa gacaaccaga tccatacgct catgccgttc ctgaggatgc ccctattggt | 360 |
| gctgaactga tcttgcctca gttttgtgga gaggctgctt ggttgttggg aggtgtggcc | 420 |
| ttccctagac acccagccct attaccatta agacaggctt gtttagtcaa actgggtgca | 480 |
| gtcgccatgt tgccttcagg acacccattg ctccactcct gggaggcatg gggtacttct | 540 |
| ccaacaacag cctgtccaga cgatgatggt tctataggta tctcaccagc agctacagcc | 600 |
| gcctggagag cccaggctgt gaccagaggc tcaactcctc aagtgggcag agctgacgca | 660 |
| tacttacaaa tggcttcaag agcaacgaga tcaggcatag aaggagtctt ccctaatgtt | 720 |
| tggcctataa acgtattcga accatgctgg tcactgtaca ctctccatct tgccggtctg | 780 |
| ttcgcccatc cagcactggc tgaggctgta agagttatcg ttgctcaact tgaagcaaga | 840 |
| ttgggagtgc atggcctcgg accagcttta cattttgctg ccgacgctga tgatactgca | 900 |
| gttgccttat gcgttctgca tttggctggc agagatcctg cagttgacgc attgagacat | 960 |
| tttgaaattg gtgagctctt tgttacattc ccaggagaga gaaatgctag tgtctctacg | 1020 |
| aacattcacg ctcttcatgc tttgagattg ttaggtaaac cagctgccgg agcaagtgca | 1080 |
| tacgtcgaag caaatagaaa tccacatggt ttgtgggaca acgaaaaatg gcacgtttca | 1140 |
| tggctttatc caactgcaca cgccgttgca gctctagctc aaggcaagcc tcaatggaga | 1200 |
| gatgaaagag cactagccgc tctactacaa gctcaaagag atgatggtgg ttggggagct | 1260 |
| ggtagaggat ccactttcga ggaaaccgcc tacgctcttt tcgctttaca cgttatggac | 1320 |
| ggatctgagg aagccacagg cagaagaaga atcgctcaag tcgtcgcaag agccttagaa | 1380 |
| tggatgctag ctagacatgc cgcacatgga ttaccacaaa caccactctg gattggtaag | 1440 |
| gaattgtact gtcctactag agtcgtaaga gtagctgagc tagctggcct gtggttagca | 1500 |
| ttaagatggg gtagaagagt attagctgaa ggtgctggtg ctgcacctta a | 1551 |

SEQ ID NO: 38
Bradyrhizobium japonicum

| | |
|---|---|
| MNALSEHILS ELRRLLSEMS DGGSVGPSVY DTAQALRFHG NVTGRQDAYA WLIAQQQADG | 60 |
| GWGSADFPLF RHAPTWAALL ALQRADPLPG AADAVQTATR FLQRQPDPYA HAVPEDAPIG | 120 |
| AELILPQFCG EAAWLLGGVA FPRHPALLPL RQACLVKLGA VAMLPSGHPL LHSWEAWGTS | 180 |
| PTTACPDDDG SIGISPAATA AWRAQAVTRG STPQVGRADA YLQMASRATR SGIEGVFPNV | 240 |
| WPINVFEPCW SLYTLHLAGL FAHPALAEAV RVIVAQLEAR LGVHGLGPAL HFAADADDTA | 300 |
| VALCVLHLAG RDPAVDALRH FEIGELFVTF PGERNASVST NIHALHALRL LGKPAAGASA | 360 |
| YVEANRNPHG LWDNEKWHVS WLYPTAHAVA ALAQGKPQWR DERALAALLQ AQRDDGGWGA | 420 |
| GRGSTFEETA YALFALHVMD GSEEATGRRR IAQVVARALE WMLARHAAHG LPQTPLWIGK | 480 |
| ELYCPTRVVR VAELAGLWLA LRWGRRVLAE GAGAAP | 516 |

SEQ ID NO: 39
Artificial Sequence

| | |
|---|---|
| atggttttgt cttcttcttg tactacagta ccacacttat cttcattagc tgtcgtgcaa | 60 |
| cttggtcctt ggagcagtag gattaaaaag aaaaccgata ctgttgcagt accagccgct | 120 |
| gcaggaaggt ggagaagggc cttggctaga gcacagcaca catcagaatc cgcagctgtc | 180 |
| gcaaagggca gcagtttgac ccctatagtg agaactgacg ctgagtcaag gagaacaaga | 240 |
| tggccaaccg atgacgatga cgccgaacct ttagtggatg agatcagggc aatgcttact | 300 |
| tccatgtctg atggtgacat ttccgtgagc gcatacgata cagcctgggt cggattggtt | 360 |
| ccaagattag acggcggtga aggtcctcaa tttccagcag ctgtgagatg gataagaaat | 420 |
| aaccagttgc ctgacggaag ttggggcgat gccgcattat tctctgccta tgacaggctt | 480 |
| atcaataccc ttgcctgcgt tgtaactttg acaaggtggt ccctagaacc agagatgaga | 540 |
| ggtagaggac tatctttttt gggtaggaac atgtggaaat tagcaactga agatgaagag | 600 |
| tcaatgccta ttggcttcga attagcattt ccatctttga tagagcttgc taagagccta | 660 |
| ggtgtccatg acttccctta tgatcaccag gccctacaag gaatctactc ttcaagagag | 720 |
| atcaaaatga agaggattcc aaaagaagtg atgcataccg ttccaacatc aatattgcac | 780 |
| agtttggagg gtatgcctgg cctagattgg gctaaactac ttaaactaca gagcagcgac | 840 |
| ggaagttttt tgttctcacc agctgccact gcatatgctt taatgaatac cggagatgac | 900 |
| aggtgtttta gctacatcga tagaacagta aagaaattca acggcggcgt ccctaatgtt | 960 |
| tatccagtgg atctatttga acatatttgg gccgttgata gacttgaaag attaggaatc | 1020 |
| tccaggtact tccaaaagga gatcgaacaa tgcatggatt atgtaaacag gcattggact | 1080 |
| gaggacggta tttgttgggc aaggaactct gatgtcaaag aggtggacga cacagctatg | 1140 |
| gcctttagac ttcttaggtt gcacggctac agcgtcagtc ctgatgtgtt taaaaacttc | 1200 |
| gaaaaggacg gtgaattttt cgcatttgtc ggacagtcta atcaagctgt taccggtatg | 1260 |
| tacaacttaa acagagcaag ccagatatcc ttcccaggcg aggatgtgct tcatagagct | 1320 |
| ggtgccttct catatgagtt cttgaggaga aaagaagcag agggagcttt gagggacaag | 1380 |
| tggatcattt ctaaagatct acctggtgaa gttgtgtata ctttggattt tccatggtac | 1440 |
| ggcaacttac ctagagtcga ggccagagac tacctagagc aatacggagg tggtgatgac | 1500 |
| gtttggattg gcaagacatt gtataggatg ccacttgtaa acaatgatgt atatttggaa | 1560 |
| ttggcaagaa tggatttcaa ccactgccag gctttgcatc agttagagtg gcaaggacta | 1620 |
| aaaagatggt atactgaaaa taggttgatg gactttggtg tcgcccaaga agatgccctt | 1680 |
| agagcttatt ttcttgcagc cgcatctgtt tacgagcctt gtagagctgc cgagaggctt | 1740 |
| gcatgggcta gagccgcaat actagctaac gccgtgagca cccacttaag aaatagccca | 1800 |
| tcattcagag aaaggttaga gcattctctt aggtgtagac ctagtgaaga gacagatggc | 1860 |
| tcctggttta actcctcaag tggctctgat gcagttttag taaaggctgt cttaagactt | 1920 |
| actgattcat tagccaggga agcacagcca atccatggag gtgacccaga agatattata | 1980 |
| cacaagttgt taagatctgc ttgggccgag tgggttaggg aaaaggcaga cgctgccgat | 2040 |
| agcgtgtgca atggtagttc tgcagtagaa caagagggat caagaatggt ccatgataaa | 2100 |
| cagacctgtc tattattggc tagaatgatc gaaatttctg ccggtagggc agctggtgaa | 2160 |
| gcagccagtg aggacggcga tagaagaata attcaattaa caggctccat ctgcgacagt | 2220 |
| cttaagcaaa aaatgctagt ttcacaggac cctgaaaaaa atgaagagat gatgtctcac | 2280 |
| gtggatgacg aattgaagtt gaggattaga gagttcgttc aatatttgct tagactaggt | 2340 |
| gaaaaaaaga ctggatctag cgaaaccagg caaacatttt taagtatagt gaaatcatgt | 2400 |
| tactatgctg ctcattgccc acctcatgtc gttgatagac acattagtag agtgattttc | 2460 |
| gagccagtaa gtgccgcaaa gtaaccgcgg | 2490 |

SEQ ID NO: 40
Zea mays

| | |
|---|---|
| MVLSSSCTTV PHLSSLAVVQ LGPWSSRIKK KTDTVAVPAA AGRWRRALAR AQHTSESAAV | 60 |
| AKGSSLTPIV RTDAESRRTR WPTDDDDAEP LVDEIRAMLT SMSDGDISVS AYDTAWVGLV | 120 |
| PRLDGGEGPQ FPAAVRWIRN NQLPDGSWGD AALFSAYDRL INTLACVVTL TRWSLEPEMR | 180 |
| GRGLSFLGRN MWKLATEDEE SMPIGFELAF PSLIELAKSL GVHDFPYDHQ ALQGIYSSRE | 240 |
| IKMKRIPKEV MHTVPTSILH SLEGMPGLDW AKLLKLQSSD GSFLFSPAAT AYALMNTGDD | 300 |
| RCFSYIDRTV KKFNGGVPNV YPVDLFEHIW AVDRLERLGI SRYFQKEIEQ CMDYVNRHWT | 360 |
| EDGICWARNS DVKEVDDTAM AFRLLRLHGY SVSPDVFKNF EKDGEFFAFV GQSNQAVTGM | 420 |
| YNLNRASQIS FPGEDVLHRA GAFSYEFLRR KEAEGALRDK WIISKDLPGE VVYTLDFPWY | 480 |
| GNLPRVEARD YLEQYGGGDD VWIGKTLYRM PLVNNDVYLE LARMDFNHCQ ALHQLEWQGL | 540 |
| KRWYTENRLM DFGVAQEDAL RAYFLAAASV YEPCRAAERL AWARAAILAN AVSTHLRNSP | 600 |
| SFRERLEHSL RCRPSEETDG SWFNSSSGSD AVLVKAVLRL TDSLAREAQP IHGGDPEDII | 660 |
| HKLLRSAWAE WVREKADAAD SVCNGSSAVE QEGSRMVHDK QTCLLLARMI EISAGRAAGE | 720 |
| AASEDGDRRI IQLTGSICDS LKQKMLVSQD PEKNEEMMSH VDDELKLRIR EFVQYLLRLG | 780 |
| EKKTGSSETR QTFLSIVKSC YYAAHCPPHV VDRHISRVIF EPVSAAK | 827 |

SEQ ID NO: 41
Artificial Sequence

| | |
|---|---|
| cttcttcact aaatacttag acagagaaaa cagagctttt taaagccatg tctcttcagt | 60 |
| atcatgttct aaactccatt ccaagtacaa cctttctcag ttctactaaa acaacaatat | 120 |
| cttcttcttt ccttaccatc tcaggatctc ctctcaatgt cgctagagac aaatccagaa | 180 |
| gcggttccat acattgttca aagcttcgaa ctcaagaata cattaattct caagaggttc | 240 |
| aacatgattt gcctctaata catgagtggc aacagcttca aggagaagat gctcctcaga | 300 |
| ttagtgttgg aagtaatagt aatgcattca aagaagcagt gaagagtgtg aaaacgatct | 360 |
| tgagaaacct aacggacggg gaaattacga tatcggctta cgatacagct tgggttgcat | 420 |
| tgatcgatgc cggagataaa actccggcgt ttccctccgc cgtgaaatgg atcgccgaga | 480 |
| accaactttc cgatggttct tggggagatg cgtatctctt ctcttatcat gatcgtctca | 540 |
| tcaataccct tgcatgcgtc gttgctctaa gatcatggaa tctctttcct catcaatgca | 600 |
| acaaaggaat cacgtttttc cgggaaaata ttgggaagct agaagacgaa aatgatgagc | 660 |
| atatgccaat cggattcgaa gtagcattcc catcgttgct tgagatagct cgaggaataa | 720 |
| acattgatgt accgtacgat tctccggtct taaaagatat atacgccaag aaagagctaa | 780 |
| agcttacaag gataccaaaa gagataatgc acaagatacc aacaacattg ttgcatagtt | 840 |
| tggaggggat gcgtgattta gattgggaaa agctcttgaa acttcaatct caagacggat | 900 |
| ctttcctctt ctctccttcc tctaccgctt ttgcattcat gcagacccga gacagtaact | 960 |
| gcctcgagta tttgcgaaat gccgtcaaac gtttcaatgg aggagttccc aatgtctttc | 1020 |
| ccgtggatct tttcgagcac atatggatag tggatcggtt acaacgttta gggatatcga | 1080 |
| gatactttga agaagagatt aaagagtgtc ttgactatgt ccacagatat tggaccgaca | 1140 |
| atggcatatg ttgggctaga tgttcccatg tccaagacat cgatgataca gccatggcat | 1200 |
| ttaggctctt aagacaacat ggataccaag tgtccgcaga tgtattcaag aactttgaga | 1260 |
| aagagggaga gtttttctgc tttgtggggc aatcaaacca agcagtaacc ggtatgttca | 1320 |
| acctataccg ggcatcacaa ttggcgtttc caagggaaga gatattgaaa aacgccaaag | 1380 |
| agttttctta taattatctg ctagaaaaac gggagagaga ggagttgatt gataagtgga | 1440 |
| ttataatgaa agacttacct ggcgagattg ggtttgcgtt agagattcca tggtacgcaa | 1500 |
| gcttgcctcg agtagagacg agattctata ttgatcaata tggtggagaa aacgacgttt | 1560 |
| ggattggcaa gactctttat aggatgccat acgtgaacaa taatggatat ctggaattag | 1620 |
| caaaacaaga ttacaacaat tgccaagctc agcatcagct cgaatgggac atattccaaa | 1680 |
| agtggtatga agaaaatagg ttaagtgagt ggggtgtgcg cagaagtgag cttctcgagt | 1740 |
| gttactactt agcggctgca actatatttg aatcagaaag gtcacatgag agaatggttt | 1800 |
| gggctaagtc aagtgtattg gttaaagcca tttcttcttc ttttggggaa tcctctgact | 1860 |
| ccagaagaag cttctccgat cagtttcatg aatacattgc caatgctcga cgaagtgatc | 1920 |
| atcactttaa tgacaggaac atgagattgg accgaccagg atcggttcag gccagtcggc | 1980 |
| ttgccggagt gttaatcggg actttgaatc aaatgtcttt tgaccttttc atgtctcatg | 2040 |
| gccgtgacgt taacaatctc ctctatctat cgtggggaga ttggatggaa aaatggaaac | 2100 |
| tatatggaga tgaaggagaa ggagagctca tggtgaagat gataattcta atgaagaaca | 2160 |
| atgacctaac taacttcttc acccacactc acttcgttcg tctcgcggaa atcatcaatc | 2220 |
| gaatctgtct tcctcgccaa tacttaaagg caaggagaaa cgatgagaag gagaagacaa | 2280 |
| taaagagtat ggagaaggag atggggaaaa tggttgagtt agcattgtcg gagagtgaca | 2340 |
| catttcgtga cgtcagcatc acgtttcttg atgtagcaaa agcattttac tactttgctt | 2400 |
| tatgtggcga tcatctccaa actcacatct ccaaagtctt gtttcaaaaa gtctagtaac | 2460 |
| ctcatcatca tcatcgatcc attaacaatc agtggatcga tgtatccata gatgcgtgaa | 2520 |
| taatatttca tgtagagaag gagaacaaat tagatcatgt agggttatca | 2570 |

SEQ ID NO: 42
Arabidopsis thaliana

| | |
|---|---|
| MSLQYHVLNS IPSTTFLSST KTTISSSFLT ISGSPLNVAR DKSRSGSIHC SKLRTQEYIN | 60 |
| SQEVQHDLPL IHEWQQLQGE DAPQISVGSN SNAFKEAVKS VKTILRNLTD GEITISAYDT | 120 |
| AWVALIDAGD KTPAFPSAVK WIAENQLSDG SWGDAYLFSY HDRLINTLAC VVALRSWNLF | 180 |
| PHQCNKGITF FRENIGKLED ENDEHMPIGF EVAFPSLLEI ARGINIDVPY DSPVLKDIYA | 240 |
| KKELKLTRIP KEIMHKIPTT LLHSLEGMRD LDWEKLLKLQ SQDGSFLFSP SSTAFAFMQT | 300 |
| RDSNCLEYLR NAVKRFNGGV PNVFPVDLFE HIWIVDRLQR LGISRYFEEE IKECLDYVHR | 360 |
| YWTDNGICWA RCSHVQDIDD TAMAFRLLRQ HGYQVSADVF KNFEKEGEFF CFVGQSNQAV | 420 |
| TGMFNLYRAS QLAFPREEIL KNAKEFSYNY LLEKREREEL IDKWIIMKDL PGEIGFALEI | 480 |
| PWYASLPRVE TRFYIDQYGG ENDVWIGKTL YRMPYVNNNG YLELAKQDYN NCQAQHQLEW | 540 |
| DIFQKWYEEN RLSEWGVRRS ELLECYYLAA ATIFESERSH ERMVWAKSSV LVKAISSSFG | 600 |
| ESSDSRRSFS DQFHEYIANA RRSDHHFNDR NMRLDRPGSV QASRLAGVLI GTLNQMSFDL | 660 |
| FMSHGRDVNN LLYLSWGDWM EKWKLYGDEG EGELMVKMII LMKNNDLTNF FTHTHFVRLA | 720 |
| EIINRICLPR QYLKARRNDE KEKTIKSMEK EMGKMVELAL SESDTFRDVS ITFLDVAKAF | 780 |
| YYFALCGDHL QTHISKVLFQ KV | 802 |

SEQ ID NO: 43
Artificial Sequence

| | |
|---|---|
| atgaatttga gtttgtgtat agcatctcca ctattgacca aatctaatag accagctgct | 60 |
| ttatcagcaa ttcatacagc tagtacatcc catggtggcc aaaccaaccc tacgaatctg | 120 |
| ataatcgata cgaccaagga gagaatacaa aaacaattca aaaatgttga aatttcagtt | 180 |
| tcttcttatg atactgcgtg ggttgccatg gttccatcac ctaattctcc aaagtctcca | 240 |
| tgtttcccag aatgtttgaa ttggctgatt aacaaccagt tgaatgatgg atcttggggt | 300 |
| ttagtcaatc acacgcacaa tcacaaccat ccacttttga aagattcttt atcctcaact | 360 |
| ttggcttgca tcgtggccct aaagagatgg aacgtaggtg aggatcagat taacaagggg | 420 |
| cttagtttca ttgaatctaa cttggcttcc gcgactgaaa aatctcaacc atctccaata | 480 |
| ggattcgata tcatctttcc aggtctgtta gagtacgcca aaaatctaga tatcaactta | 540 |
| ctgtctaagc aaactgattt ctcactaatg ttacacaaga gagaattaga acaaaagaga | 600 |
| tgtcattcaa acgaaatgga tggttaccta gcttatatct ctgaaggtct tggtaatctt | 660 |
| tacgattgga atatggtgaa aaagtaccag atgaaaaatg gctcagtttt caattcccct | 720 |
| tctgcaactg cggcagcatt cattaaccat caaaatccag gatgcctgaa ctatttgaat | 780 |
| tcactactag acaaattcgg caacgcagtt ccaactgtat accctcacga tttgtttatc | 840 |
| agattgagta tggtggatac aattgaaaga cttggtatat cccaccactt tagagtcgag | 900 |
| atcaaaaatg ttttggatga gacataccgt tgttgggtgg agagagatga acaaatcttt | 960 |
| atggatgttg tgacgtgcgc gttggccttt agattgttgc gtattaacgg ttacgaagtt | 1020 |
| agtccagatc cacttgccga aattacaaac gaattagctt taaaggatga atacgccgct | 1080 |
| cttgaaacat atcatgcgtc acatatcctt taccaagagg acttatcatc tggaaaacaa | 1140 |
| attcttaaat ctgctgattt cctgaaggaa atcatatcca ctgatagtaa tagactgtcc | 1200 |
| aaactgatcc ataaagaggt tgaaaatgca cttaagttcc ctattaacac cggcttagaa | 1260 |
| cgtattaaca caagacgtaa catccagctt tacaacgtag acaatactag aatcttgaaa | 1320 |
| accacttacc attcttccaa catatcaaac actgattacc taagattagc tgttgaagat | 1380 |
| ttctacacat gtcagtctat ctatagagaa gagctgaaag gattagagag atgggtcgtt | 1440 |
| gagaataagc tagatcaatt gaaatttgcc agacaaaaga cagcttattg ttacttctca | 1500 |
| gttgccgcca ctttatcaag tccagaattg tcagatgcac gtatttcttg ggctaaaaac | 1560 |
| ggaattttga caactgttgt tgatgatttc tttgatattg gcgggacaat cgacgaattg | 1620 |
| acaaacctga ttcaatgcgt tgaaaagtgg aatgtcgatg tcgataaaga ctgttgctca | 1680 |
| gaacatgtta gaatactgtt cttggctctg aaagatgcta tctgttggat cggggatgag | 1740 |
| gctttcaaat ggcaagctag agatgtgacg tctcacgtca ttcaaacctg gctagaactg | 1800 |
| atgaactcta tgttgagaga agcaatttgg actagagatg catacgttcc tacattaaac | 1860 |
| gagtatatgg aaaacgctta tgtctccttt gctttgggtc ctatcgttaa gcctgccata | 1920 |
| tactttgtag gaccaaagct atccgaggaa atcgtcgaat catcagaata ccataacttg | 1980 |
| ttcaagttaa tgtccacaca aggcagatta cttaatgata ttcattcttt caaaagagag | 2040 |
| tttaaggaag gaaagttaaa tgctgttgct ctgcatcttt ctaatggcga aagtggtaaa | 2100 |
| gtcgaagagg aagtagttga ggaaatgatg atgatgatca aaaacaagag aaaggagttg | 2160 |
| atgaaactaa tcttcgaaga gaacggttca attgttccta gagcatgtaa ggatgcattt | 2220 |
| tggaacatgt gtcatgtgct aaactttttc tacgcaaacg acgatggttt tactgggaac | 2280 |
| acaatactag atacagtaaa agacatcata tacaaccctt tggtcttagt aaacgaaaac | 2340 |
| gaggagcaaa gataa | 2355 |

SEQ ID NO: 44
Stevia rebaudiana

| | |
|---|---|
| MNLSLCIASP LLTKSNRPAA LSAIHTASTS HGGQTNPTNL IIDTTKERIQ KQFKNVEISV | 60 |
| SSYDTAWVAM VPSPNSPKSP CFPECLNWLI NNQLNDGSWG LVNHTHNHNH PLLKDSLSST | 120 |
| LACIVALKRW NVGEDQINKG LSFIESNLAS ATEKSQPSPI GFDIIFPGLL EYAKNLDINL | 180 |
| LSKQTDFSLM LHKRELEQKR CHSNEMDGYL AYISEGLGNL YDWNMVKKYQ MKNGSVFNSP | 240 |
| SATAAAFINH QNPGCLNYLN SLLDKFGNAV PTVYPHDLFI RLSMVDTIER LGISHHFRVE | 300 |
| IKNVLDETYR CWVERDEQIF MDVVTCALAF RLLRINGYEV SPDPLAEITN ELALKDEYAA | 360 |
| LETYHASHIL YQEDLSSGKQ ILKSADFLKE IISTDSNRLS KLIHKEVENA LKFPINTGLE | 420 |
| RINTRRNIQL YNVDNTRILK TTYHSSNISN TDYLRLAVED FYTCQSIYRE ELKGLERWVV | 480 |
| ENKLDQLKFA RQKTAYCYFS VAATLSSPEL SDARISWAKN GILTTVVDDF FDIGGTIDEL | 540 |
| TNLIQCVEKW NVDVDKDCCS EHVRILFLAL KDAICWIGDE AFKWQARDVT SHVIQTWLEL | 600 |
| MNSMLREAIW TRDAYVPTLN EYMENAYVSF ALGPIVKPAI YFVGPKLSEE IVESSEYHNL | 660 |
| FKLMSTQGRL LNDIHSFKRE FKEGKLNAVA LHLSNGESGK VEEEVVEEMM MMIKNKRKEL | 720 |
| MKLIFEENGS IVPRACKDAF WNMCHVLNFF YANDDGFTGN TILDTVKDII YNPLVLVNEN | 780 |
| EEQR | 784 |

SEQ ID NO: 45
Artificial Sequence

| | |
|---|---|
| atgaatctgt ccctttgtat agctagtcca ctgttgacaa aatcttctag accaactgct | 60 |
| ctttctgcaa ttcatactgc cagtactagt catggaggtc aaacaaaccc aacaaatttg | 120 |
| ataatcgata ctactaagga gagaatccaa aagctattca aaaatgttga aatctcagta | 180 |
| tcatcttatg acaccgcatg ggttgcaatg gtgccatcac ctaattcccc aaaaagtcca | 240 |
| tgttttccag agtgcttgaa ttggttaatc aataatcagt taaacgatgg ttcttggggt | 300 |
| ttagtcaacc acactcataa ccacaatcat ccattattga aggactcttt atcatcaaca | 360 |
| ttagcctgta ttgttgcatt gaaaagatgg aatgtaggtg aagatcaaat caacaagggt | 420 |
| ttatcattca tagaatccaa tctagcttct gctaccgaca aatcacaacc atctccaatc | 480 |
| gggttcgaca taatcttccc tggtttgctg gagtatgcca aaaaccttga tatcaactta | 540 |
| ctgtctaaac aaacagattt ctctttgatg ctacacaaaa gagagttaga gcagaaaaga | 600 |
| tgccattcta acgaaattga cgggtactta gcatatatct cagaaggttt gggtaatttg | 660 |
| tatgactgga acatggtcaa aaagtatcag atgaaaaatg gatccgtatt caattctcct | 720 |
| tctgcaactg ccgcagcatt cattaatcat caaaaccctg ggtgtcttaa ctacttgaac | 780 |
| tcactattag ataagtttgg aaatgcagtt ccaacagtct atcctttgga cttgtacatc | 840 |
| agattatcta tggttgacac tatagagaga ttaggtattt ctcatcattt cagagttgag | 900 |
| atcaaaaatg ttttggacga gacatacaga tgttgggtcg aaagagatga gcaaatcttt | 960 |
| atggatgtcg tgacctgcgc tctggctttt agattgctaa ggatacacgg atacaaagta | 1020 |
| tctcctgatc aactggctga gattacaaac gaactggctt tcaaagacga atacgccgca | 1080 |
| ttagaaacat accatgcatc ccaaatactt taccaggaag acctaagttc aggaaaacaa | 1140 |
| atcttgaagt ctgcagattt cctgaaaggc attctgtcta cagatagtaa taggttgtct | 1200 |
| aaattgatac acaaggaagt agaaaacgca ctaaagtttc ctattaacac tggtttagag | 1260 |
| agaatcaata ctaggagaaa cattcagctg tacaacgtag ataatacaag gattcttaag | 1320 |
| accacctacc atagttcaaa catttccaac acctattact taagattagc tgtcgaagac | 1380 |
| ttttacactt gtcaatcaat ctacagagag gagttaaagg gcctagaaag atgggtagtt | 1440 |
| caaaacaagt tggatcaact gaagtttgct agacagaaga cagcatactg ttatttctct | 1500 |
| gttgctgcta ccctttcatc cccagaattg tctgatgcca gaataagttg ggccaaaaat | 1560 |
| ggtattctta caactgtagt cgatgatttc tttgatattg gaggtactat tgatgaactg | 1620 |
| acaaatctta ttcaatgtgt tgaaaagtgg aacgtggatg tagataagga ttgctgcagt | 1680 |
| gaacatgtga gaatactttt cctggctcta aaagatgcaa tatgttggat tggcgacgag | 1740 |
| gccttcaagt ggcaagctag agatgttaca tctcatgtca tccaaacttg gcttgaactg | 1800 |
| atgaactcaa tgctaagaga agcaatctgg acaagagatg catacgttcc aacattgaac | 1860 |
| gaatacatgg aaaacgctta cgtctcattt gccttgggtc ctattgttaa gccagccata | 1920 |
| tactttgttg ggccaaagtt atccgaagag attgttgagt cttccgaata tcataaccta | 1980 |
| ttcaagttaa tgtcaacaca aggcagactt ctgaacgata tccactcctt caaaagagaa | 2040 |
| ttcaaggaag gtaagctaaa cgctgttgct ttgcacttgt ctaatggtga atctggcaaa | 2100 |
| gtggaagagg aagtcgttga ggaaatgatg atgatgatca aaaacaagag aaaggaattg | 2160 |
| atgaaattga ttttcgagga aaatggttca atcgtaccta gagcttgtaa agatgctttt | 2220 |
| tggaatatgt gccatgttct taacttcttt tacgctaatg atgatggctt cactggaaat | 2280 |
| acaatattgg atacagttaa agatatcatc tacaacccac ttgttttggt caatgagaac | 2340 |
| gaggaacaaa gataa | 2355 |

SEQ ID NO: 46
Stevia rebaudiana

| | |
|---|---|
| MNLSLCIASP LLTKSSRPTA LSAIHTASTS HGGQTNPTNL IIDTTKERIQ KLFKNVEISV | 60 |
| SSYDTAWVAM VPSPNSPKSP CFPECLNWLI NNQLNDGSWG LVNHTHNHNH PLLKDSLSST | 120 |
| LACIVALKRW NVGEDQINKG LSFIESNLAS ATDKSQPSPI GFDIIFPGLL EYAKNLDINL | 180 |
| LSKQTDFSLM LHKRELEQKR CHSNEIDGYL AYISEGLGNL YDWNMVKKYQ MKNGSVFNSP | 240 |
| SATAAAFINH QNPGCLNYLN SLLDKFGNAV PTVYPLDLYI RLSMVDTIER LGISHHFRVE | 300 |
| IKNVLDETYR CWVERDEQIF MDVVTCALAF RLLRIHGYKV SPDQLAEITN ELAFKDEYAA | 360 |
| LETYHASQIL YQEDLSSGKQ ILKSADFLKG ILSTDSNRLS KLIHKEVENA LKFPINTGLE | 420 |
| RINTRRNIQL YNVDNTRILK TTYHSSNISN TYYLRLAVED FYTCQSIYRE ELKGLERWVV | 480 |
| QNKLDQLKFA RQKTAYCYFS VAATLSSPEL SDARISWAKN GILTTVVDDF FDIGGTIDEL | 540 |
| TNLIQCVEKW NVDVDKDCCS EHVRILFLAL KDAICWIGDE AFKWQARDVT SHVIQTWLEL | 600 |
| MNSMLREAIW TRDAYVPTLN EYMENAYVSF ALGPIVKPAI YFVGPKLSEE IVESSEYHNL | 660 |
| FKLMSTQGRL LNDIHSFKRE FKEGKLNAVA LHLSNGESGK VEEEVVEEMM MMIKNKRKEL | 720 |
| MKLIFEENGS IVPRACKDAF WNMCHVLNFF YANDDGFTGN TILDTVKDII YNPLVLVNEN | 780 |
| EEQR | 784 |

SEQ ID NO: 47
Artificial Sequence

| | |
|---|---|
| atggctatgc cagtgaagct aacacctgcg tcattatcct taaaagctgt gtgctgcaga | 60 |
| ttctcatccg gtggccatgc tttgagattc gggagtagtc tgccatgttg gagaaggacc | 120 |
| cctacccaaa gatctacttc ttcctctact actagaccag ctgccgaagt gtcatcaggt | 180 |
| aagagtaaac aacatgatca ggaagctagt gaagcgacta tcagacaaca attacaactt | 240 |
| gtggatgtcc tggagaatat gggaatatcc agacattttg ctgcagagat aaagtgcata | 300 |
| ctagacagaa cttacagatc ttggttacaa agacacgagg aaatcatgct ggacactatg | 360 |
| acatgtgcta tggcttttag aatcctaaga ttgaacggat acaacgtttc atcagatgaa | 420 |
| ctataccacg ttgtagaggc atctggtctg cataattctt tgggtgggta tcttaacgat | 480 |
| accagaacac tacttgaatt acacaaggct tcaacagtta gtatctctga ggatgaatct | 540 |
| atcttagatt caattggctc tagatccaga acattgctta gagaacaatt ggagtctggt | 600 |
| ggcgcactga gaaagccttc tttattcaaa gaggttgaac atgcactgga tggacctttt | 660 |
| tacaccacac ttgatagact tcatcatagg tggaatattg aaaacttcaa cattattgag | 720 |
| caacacatgt tggagactcc atacttatct aaccagcata catcaaggga tatcctagca | 780 |
| ttgtcaatta gagatttttc ctcctcacaa ttcacttatc aacaagagct acagcatctg | 840 |
| gagagttggg ttaaggaatg tagattagat caactacagt tcgcaagaca gaaattagcg | 900 |
| tacttttacc tatcagccgc aggcaccatg ttttctcctg agctttctga tgcgagaaca | 960 |
| ttatgggcca aaaacggggt gttgacaact attgttgatg atttctttga tgttgccggt | 1020 |
| tctaaagagg aattggaaaa cttagtcatg ctggtcgaaa tgtgggatga acatcacaaa | 1080 |
| gttgaattct attctgagca ggtcgaaatc atcttctctt ccatctacga ttctgtcaac | 1140 |
| caattgggtg agaaggcctc tttggttcaa gacagatcaa ttacaaaaca ccttgttgaa | 1200 |
| atatggttag acttgttaaa gtccatgatg acggaagttg aatggagact gtcaaaatac | 1260 |
| gtgcctacag aaaaggaata catgattaat gcctctctta tcttcggcct aggtccaatc | 1320 |
| gttttaccag ctttgtattt cgttggtcca aagatttcag aaagtatagt aaaggaccca | 1380 |
| gaatatgatg aattgttcaa actaatgtca acatgtggta gattgttgaa tgacgtgcaa | 1440 |
| acgttcgaaa gagaatacaa tgagggtaaa ctgaattctg tcagtctatt ggttcttcac | 1500 |
| ggaggcccaa tgtctatttc agacgcaaag aggaaattac aaaagcctat tgatacgtgt | 1560 |
| agaagagatc ttctttcttt ggtccttaga gaagagtctg tagtaccaag accatgtaag | 1620 |
| gaactattct ggaaaatgtg taaagtgtgc tatttctttt actcaacaac tgatgggttt | 1680 |
| tctagtcaag tcgaaagagc aaaagaggta gacgctgtca taaatgagcc actgaagttg | 1740 |
| caaggttctc atacactggt atctgatgtt taa | 1773 |

SEQ ID NO: 48
Zea mays

| | |
|---|---|
| MAMPVKLTPA SLSLKAVCCR FSSGGHALRF GSSLPCWRRT PTQRSTSSST TRPAAEVSSG | 60 |
| KSKQHDQEAS EATIRQQLQL VDVLENMGIS RHFAAEIKCI LDRTYRSWLQ RHEEIMLDTM | 120 |
| TCAMAFRILR LNGYNVSSDE LYHVVEASGL HNSLGGYLND TRTLLELHKA STVSISEDES | 180 |
| ILDSIGSRSR TLLREQLESG GALRKPSLFK EVEHALDGPF YTTLDRLHHR WNIENFNIIE | 240 |
| QHMLETPYLS NQHTSRDILA LSIRDFSSSQ FTYQQELQHL ESWVKECRLD QLQFARQKLA | 300 |
| YFYLSAAGTM FSPELSDART LWAKNGVLTT IVDDFFDVAG SKEELENLVM LVEMWDEHHK | 360 |
| VEFYSEQVEI IFSSIYDSVN QLGEKASLVQ DRSITKHLVE IWLDLLKSMM TEVEWRLSKY | 420 |
| VPTEKEYMIN ASLIFGLGPI VLPALYFVGP KISESIVKDP EYDELFKLMS TCGRLLNDVQ | 480 |
| TFEREYNEGK LNSVSLLVLH GGPMSISDAK RKLQKPIDTC RRDLLSLVLR EESVVPRPCK | 540 |
| ELFWKMCKVC YFFYSTTDGF SSQVERAKEV DAVINEPLKL QGSHTLVSDV | 590 |

SEQ ID NO: 49
Artificial Sequence

| | |
|---|---|
| atgcagaact tccatggtac aaaggaaagg atcaaaaaga tgtttgacaa gattgaattg | 60 |
| tccgtttctt cttatgatac agcctgggtt gcaatggtcc catcccctga ttgcccagaa | 120 |
| acaccttgtt ttccagaatg tactaaatgg atcctagaaa atcagttggg tgatggtagt | 180 |
| tggtcacttc ctcatggcaa tccacttcta gttaaagatg cattatcttc cactcttgct | 240 |
| tgtattctgg ctcttaaaag atggggaatc ggtgaggaac agattaacaa aggactgaga | 300 |
| ttcatagaac tcaactctgc tagtgtaacc gataacgaac aacacaaacc aattggattt | 360 |
| gacattatct ttccaggtat gattgaatac gctatagact tagacctgaa tctaccacta | 420 |
| aaaccaactg acattaactc catgttgcat cgtagagccc ttgaattgac atcaggtgga | 480 |
| ggcaaaaatc tagaaggtag aagagcttac ttggcctacg tctctgaagg aatcggtaag | 540 |
| ctgcaagatt gggaaatggc tatgaaatac caacgtaaaa acggatctct gttcaatagt | 600 |
| ccatcaacaa ctgcagctgc attcatccat atacaagatg ctgaatgcct ccactatatt | 660 |
| cgttctcttc tccagaaatt tggaaacgca gtccctacaa tataccctct cgatatctat | 720 |
| gccagacttt caatggtaga tgccctggaa cgtcttggta ttgatagaca tttcagaaag | 780 |
| gagagaaagt tcgttctgga tgaaacatac agattttggt tgcaaggaga agaggagatt | 840 |
| ttctccgata acgcaacctg tgctttggcc ttcagaatat tgagacttaa tggttacgat | 900 |
| gtctctcttg aagatcactt ctctaactct ctgggcggtt acttaaagga ctcaggagca | 960 |
| gctttagaac tgtacagagc cctccaattg tcttacccag acgagtccct cctggaaaag | 1020 |
| caaaattcta gaacttctta cttcttaaaa caaggtttat ccaatgtctc cctctgtggt | 1080 |
| gacagattgc gtaaaaacat aattggagag gtgcatgatg ctttaaactt ttccgaccac | 1140 |
| gctaacttac aaagattagc tattcgtaga aggattaagc attacgctac tgacgataca | 1200 |
| aggattctaa aaacttccta cagatgctca acaatcggta accaagattt tctaaaactt | 1260 |
| gcagtggaag atttcaatat ctgtcaatca atacaaagag aggaattcaa gcatattgaa | 1320 |
| agatgggtcg ttgaaagacg tctagacaag ttaaagttcg ctagacaaaa agaggcctat | 1380 |
| tgctatttct cagccgcagc aacattgttt gcccctgaat tgtctgatgc tagaatgtct | 1440 |
| tgggccaaaa atggtgtatt gacaactgtg gttgatgatt tcttcgatgt cggaggctct | 1500 |
| gaagaggaat tagttaactt gatagaattg atcgagcgtt gggatgtgaa tggcagtgca | 1560 |
| gatttttgta gtgaggaagt tgagattatc tattctgcta tccactcaac tatctctgaa | 1620 |
| ataggtgata agtcatttgg ctggcaaggt agagatgtaa agtctcaagt tatcaagatc | 1680 |
| tggctggact tattgaaatc aatgttaact gaagctcaat ggtcttcaaa caagtctgtt | 1740 |
| cctaccctag atgagtatat gacaaccgcc catgtttcat tcgcacttgg tccaattgta | 1800 |
| cttccagcct tatacttcgt tggcccaaag ttgtcagaag aggttgcagg tcatcctgaa | 1860 |
| ctactaaacc tctacaaagt cacatctact tgtggcagac tactgaatga ttggagaagt | 1920 |
| tttaagagag aatccgagga aggtaagctc aacgctatta gtttatacat gatccactcc | 1980 |
| ggtggtgctt ctacagaaga ggaaacaatc gaacatttca aaggtttgat tgattctcag | 2040 |
| agaaggcaac tgttacaatt ggtgttgcaa gagaaggata gtatcatacc tagaccatgt | 2100 |
| aaagatctat tttggaatat gattaagtta ttacacactt tctacatgaa agatgatggc | 2160 |
| ttcacctcaa atgagatgag gaatgtagtt aaggcaatca ttaacgaacc aatctcactg | 2220 |
| gatgaattat ga | 2232 |

SEQ ID NO: 50
Populus trichocarpa

| | |
|---|---|
| MSCIRPWFCP SSISATLTDP ASKLVTGEFK TTSLNFHGTK ERIKKMFDKI ELSVSSYDTA | 60 |
| WVAMVPSPDC PETPCFPECT KWILENQLGD GSWSLPHGNP LLVKDALSST LACILALKRW | 120 |
| GIGEEQINKG LRFIELNSAS VTDNEQHKPI GFDIIFPGMI EYAKDLDLNL PLKPTDINSM | 180 |
| LHRRALELTS GGGKNLEGRR AYLAYVSEGI GKLQDWEMAM KYQRKNGSLF NSPSTTAAAF | 240 |
| IHIQDAECLH YIRSLLQKFG NAVPTIYPLD IYARLSMVDA LERLGIDRHF RKERKFVLDE | 300 |
| TYRFWLQGEE EIFSDNATCA LAFRILRLNG YDVSLEDHFS NSLGGYLKDS GAALELYRAL | 360 |
| QLSYPDESLL EKQNSRTSYF LKQGLSNVSL CGDRLRKNII GEVHDALNFP DHANLQRLAI | 420 |
| RRRIKHYATD DTRILKTSYR CSTIGNQDFL KLAVEDFNIC QSIQREEFKH IERWVVERRL | 480 |
| DKLKFARQKE AYCYFSAAAT LFAPELSDAR MSWAKNGVLT TVVDDFFDVG GSEEELVNLI | 540 |
| ELIERWDVNG SADFCSEEVE IIYSAIHSTI SEIGDKSFGW QGRDVKSHVI KIWLDLLKSM | 600 |
| LTEAQWSSNK SVPTLDEYMT TAHVSFALGP IVLPALYFVG PKLSEEVAGH PELLNLYKVM | 660 |
| STCGRLLNDW RSFKRESEEG KLNAISLYMI HSGGASTEEE TIEHFKGLID SQRRQLLQLV | 720 |
| LQEKDSIIPR PCKDLFWNMI KLLHTFYMKD DGFTSNEMRN VVKAIINEPI SLDEL | 775 |

SEQ ID NO: 51
Artificial Sequence

| | |
|---|---|
| atgtctatca accttcgctc ctccggttgt tcgtctccga tctcagctac tttggaacga | 60 |
| ggattggact cagaagtaca gacaagagct aacaatgtga gctttgagca aacaaaggag | 120 |
| aagattagga agatgttgga gaaagtggag ctttctgttt cggcctacga tactagttgg | 180 |
| gtagcaatgg ttccatcacc gagctcccaa aatgctccac ttttcccaca gtgtgtgaaa | 240 |
| tggttattgg ataatcaaca tgaagatgga tcttggggac ttgataacca tgaccatcaa | 300 |
| tctcttaaga aggatgtgtt atcatctaca ctggctagta tcctcgcgtt aaagaagtgg | 360 |
| ggaattggtg aaagacaaat aaacaagggt ctccagttta ttgagctgaa ttctgcatta | 420 |
| gtcactgatg aaaccataca gaaaccaaca gggtttgata ttatatttcc tgggatgatt | 480 |
| aaatatgcta gagatttgaa tctgacgatt ccattgggct cagaagtggt ggatgacatg | 540 |
| atacgaaaaa gagatctgga tcttaaatgt gatagtgaaa agttttcaaa gggaagagaa | 600 |
| gcatatctgg cctatgtttt agaggggaca agaaacctaa aagattggga tttgatagtc | 660 |
| aaatatcaaa ggaaaaatgg gtcactgttt gattctccag ccacaacagc agctgctttt | 720 |
| actcagtttg ggaatgatgg ttgtctccgt tatctctgtt ctctccttca gaaattcgag | 780 |
| gctgcagttc cttcagttta tccatttgat caatatgcac gccttagtat aattgtcact | 840 |
| cttgaaagct taggaattga tagagatttc aaaaccgaaa tcaaaagcat attggatgaa | 900 |
| acctatagat attggcttcg tggggatgaa gaaatatgtt tggacttggc cacttgtgct | 960 |
| ttggctttcc gattattgct tgctcatggc tatgatgtgt cttacgatcc gctaaaacca | 1020 |
| tttgcagaag aatctggttt ctctgatact ttggaaggat atgttaagaa tacgttttct | 1080 |
| gtgttagaat tatttaaggc tgctcaaagt tatccacatg aatcagcttt gaagaagcag | 1140 |
| tgttgttgga ctaaacaata tctggagatg gaattgtcca gctgggttaa gacctctgtt | 1200 |
| cgagataaat acctcaagaa agaggtcgag gatgctcttg cttttccctc ctatgcaagc | 1260 |
| ctagaaagat cagatcacag gagaaaaata ctcaatggtt ctgctgtgga aaacaccaga | 1320 |
| gttacaaaaa cctcatatcg tttgcacaat atttgcacct ctgatatcct gaagttagct | 1380 |
| gtggatgact tcaatttctg ccagtccata caccgtgaag aaatggaacg tcttgatagg | 1440 |
| tggattgtgg agaatagatt gcaggaactg aaatttgcca gacagaagct ggcttactgt | 1500 |
| tatttctctg gggctgcaac tttattttct ccagaactat ctgatgctcg tatatcgtgg | 1560 |
| gccaaaggtg gagtacttac aacggttgta gacgacttct ttgatgttgg agggtccaaa | 1620 |
| gaagaactgg aaaacctcat acacttggtc gaaaagtggg atttgaacgg tgttcctgag | 1680 |
| tacagctcag aacatgttga gatcatattc tcagttctaa gggacaccat tctcgaaaca | 1740 |
| ggagacaaag cattcaccta tcaaggacgc aatgtgacac accacattgt gaaaatttgg | 1800 |
| ttggatctgc tcaagtctat gttgagagaa gccgagtggt ccagtgacaa gtcaacacca | 1860 |
| agcttggagg attacatgga aaatgcgtac atatcatttg cattaggacc aattgtcctc | 1920 |
| ccagctacct atctgatcgg acctccactt ccagagaaga cagtcgatag ccaccaatat | 1980 |
| aatcagctct acaagctcgt gagcactatg ggtcgtcttc taaatgacat acaaggtttt | 2040 |
| aagagagaaa gcgcggaagg gaagctgaat gcggtttcat tgcacatgaa acacgagaga | 2100 |
| gacaatcgca gcaaagaagt gatcatagaa tcgatgaaag gtttagcaga gagaaagagg | 2160 |
| gaagaattgc ataagctagt tttggaggag aaaggaagtg tggttccaag ggaatgcaaa | 2220 |
| gaagcgttct tgaaaatgag caaagtgttg aacttatttt acaggaagga cgatggattc | 2280 |
| acatcaaatg atctgatgag tcttgttaaa tcagtgatct acgagcctgt tagcttacag | 2340 |
| aaagaatctt taacttga | 2358 |

SEQ ID NO: 52
Arabidopsis thaliana

| | |
|---|---|
| MSINLRSSGC SSPISATLER GLDSEVQTRA NNVSFEQTKE KIRKMLEKVE LSVSAYDTSW | 60 |
| VAMVPSPSSQ NAPLFPQCVK WLLDNQHEDG SWGLDNHDHQ SLKKDVLSST LASILALKKW | 120 |
| GIGERQINKG LQFIELNSAL VTDETIQKPT GFDIIFPGMI KYARDLNLTI PLGSEVVDDM | 180 |
| IRKRDLDLKC DSEKFSKGRE AYLAYVLEGT RNLKDWDLIV KYQRKNGSLF DSPATTAAAF | 240 |
| TQFGNDGCLR YLCSLLQKFE AAVPSVYPFD QYARLSIIVT LESLGIDRDF KTEIKSILDE | 300 |
| TYRYWLRGDE EICLDLATCA LAFRLLLAHG YDVSYDPLKP FAEESGFSDT LEGYVKNTFS | 360 |
| VLELFKAAQS YPHESALKKQ CCWTKQYLEM ELSSWVKTSV RDKYLKKEVE DALAFPSYAS | 420 |
| LERSDHRRKI LNGSAVENTR VTKTSYRLHN ICTSDILKLA VDDFNFCQSI HREEMERLDR | 480 |
| WIVENRLQEL KFARQKLAYC YFSGAATLFS PELSDARISW AKGGVLTTVV DDFFDVGGSK | 540 |
| EELENLIHLV EKWDLNGVPE YSSEHVEIIF SVLRDTILET GDKAFTYQGR NVTHHIVKIW | 600 |
| LDLLKSMLRE AEWSSDKSTP SLEDYMENAY ISFALGPIVL PATYLIGPPL PEKTVDSHQY | 660 |
| NQLYKLVSTM GRLLNDIQGF KRESAEGKLN AVSLHMKHER DNRSKEVIIE SMKGLAERKR | 720 |
| EELHKLVLEE KGSVVPRECK EAFLKMSKVL NLFYRKDDGF TSNDLMSLVK SVIYEPVSLQ | 780 |
| KESLT | 785 |

SEQ ID NO: 53
Artificial Sequence

| | |
|---|---|
| atggaatttg atgaaccatt ggttgacgaa gcaagatctt tagtgcagcg tactttacaa | 60 |
| gattatgatg acagatacgg cttcggtact atgtcatgtg ctgcttatga tacagcctgg | 120 |
| gtgtctttag ttacaaaaac agtcgatggg agaaaacaat ggcttttccc agagtgtttt | 180 |
| gaatttctac tagaaacaca atctgatgcc ggaggatggg aaatcgggaa ttcagcacca | 240 |
| atcgacggta tattgaatac agctgcatcc ttacttgctc taaaacgtca cgttcaaact | 300 |
| gagcaaatca tccaacctca acatgaccat aaggatctag caggtagagc tgaacgtgcc | 360 |
| gctgcatctt tgagagcaca attggctgca ttggatgtgt ctacaactga acacgtcggt | 420 |
| tttgagataa ttgttcctgc aatgctagac ccattagaag ccgaagatcc atctctagtt | 480 |
| ttcgattttc cagctaggaa acctttgatg aagattcatg atgctaagat gagtagattc | 540 |
| aggccagaat acttgtatgg caaacaacca atgaccgcct tacattcatt agaggctttc | 600 |
| ataggcaaaa tcgacttcga taaggtaaga caccaccgta cccatgggtc tatgatgggt | 660 |
| tctccttcat ctaccgcagc ctacttaatg cacgcttcac aatgggatgg tgactcagag | 720 |
| gcttacctta gacacgtgat taaacacgca gcagggcagg gaactggtgc tgtaccatct | 780 |
| gctttcccat caacacattt tgagtcatct tggattctta ccacattgtt tagagctgga | 840 |
| ttttcagctt ctcatcttgc ctgtgatgag ttgaacaagt tggtcgagat acttgagggc | 900 |
| tcattcgaga aggaaggtgg ggcaatcggt tacgctccag ggtttcaagc agatgttgat | 960 |
| gatactgcta aaacaataag tacattagca gtccttggaa gagatgctac accaagacaa | 1020 |
| atgatcaagg tatttgaagc taatacacat tttagaacat accctggtga aagagatcct | 1080 |
| tctttgacag ctaattgtaa tgctctatca gccttactac accaaccaga tgcagcaatg | 1140 |
| tatggatctc aaattcaaaa gattaccaaa tttgtctgtg actattggtg gaagtctgat | 1200 |
| ggtaagatta aagataagtg gaacacttgc tacttgtacc catctgtctt attagttgag | 1260 |
| gttttggttg atcttgttag tttattggag cagggtaaat tgcctgatgt tttggatcaa | 1320 |
| gagcttcaat acagagtcgc catcacattg ttccaagcat gtttaaggcc attactagac | 1380 |
| caagatgccg aaggatcatg gaacaagtct atcgaagcca cagcctacgg catccttatc | 1440 |
| ctaactgaag ctaggagagt ttgtttcttc gacagattgt ctgagccatt gaatgaggca | 1500 |
| atccgtagag gtatcgcttt cgccgactct atgtctggaa ctgaagctca gttgaactac | 1560 |
| atttggatcg aaaaggttag ttacgcacct gcattattga ctaaatccta tttgttagca | 1620 |
| gcaagatggg ctgctaagtc tcctttaggc gcttccgtag gctcttcttt gtggactcca | 1680 |
| ccaagagaag gattggataa gcatgtcaga ttattccatc aagctgagtt attcagatcc | 1740 |
| cttccagaat gggaattaag agcctccatg attgaagcag ctttgttcac accacttcta | 1800 |
| agagcacata gactagacgt tttccctaga caagatgtag gtgaagacaa atatcttgat | 1860 |
| gtagttccat tcttttggac tgccgctaac aacagagata gaacttacgc ttccactcta | 1920 |
| ttcctttacg atatgtgttt tatcgcaatg ttaaacttcc agttagacga attcatggag | 1980 |
| gccacagccg gtatcttatt cagagatcat atggatgatt tgaggcaatt gattcatgat | 2040 |
| cttttggcag agaaaacttc cccaaagagt tctggtagaa gtagtcaggg cacaaaagat | 2100 |
| gctgactcag gtatagagga agacgtgtca atgtccgatt cagcttcaga ttcccaggat | 2160 |
| agaagtccag aatacgactt ggttttcagt gcattgagta cctttacaaa acatgtcttg | 2220 |
| caacacccat ctatacaaag tgcctctgta tgggatagaa aactacttgc tagagagatg | 2280 |
| aaggcttact tacttgctca tatccaacaa gcagaagatt caactccatt gtctgaattg | 2340 |
| aaagatgtgc ctcaaaagac tgatgtaaca agagtttcta catctactac taccttcttt | 2400 |
| aactgggtta gaacaacttc cgcagaccat atatcctgcc catactcctt ccactttgta | 2460 |
| gcatgccatc taggcgcagc attgtcacct aaagggtcta acggtgattg ctatccttca | 2520 |
| gctggtgaga agttcttggc agctgcagtc tgcagacatt tggccaccat gtgtagaatg | 2580 |
| tacaacgatc ttggatcagc tgaacgtgat tctgatgaag gtaatttgaa ctccttggac | 2640 |
| ttccctgaat tcgccgattc cgcaggaaac ggagggatag aaattcagaa ggccgctcta | 2700 |
| ttaaggttag ctgagtttga gagagattca tacttagagg ccttccgtcg tttacaagat | 2760 |
| gaatccaata gagttcacgg tccagccggt ggtgatgaag ccagattgtc cagaaggaga | 2820 |
| atggcaatcc ttgaattctt cgcccagcag gtagatttgt acggtcaagt atacgtcatt | 2880 |
| agggatattt ccgctcgtat tcctaaaaac gaggttgaga aaaagagaaa attggatgat | 2940 |
| gctttcaatt ga | 2952 |

SEQ ID NO: 54
Phomopsis amygdali

| | |
|---|---|
| MEFDEPLVDE ARSLVQRTLQ DYDDRYGFGT MSCAAYDTAW VSLVTKTVDG RKQWLFPECF | 60 |
| EFLLETQSDA GGWEIGNSAP IDGILNTAAS LLALKRHVQT EQIIQPQHDH KDLAGRAERA | 120 |
| AASLRAQLAA LDVSTTEHVG FEIIVPAMLD PLEAEDPSLV FDFPARKPLM KIHDAKMSRF | 180 |
| RPEYLYGKQP MTALHSLEAF IGKIDFDKVR HHRTHGSMMG SPSSTAAYLM HASQWDGDSE | 240 |
| AYLRHVIKHA AGQGTGAVPS AFPSTHFESS WILTTLFRAG FSASHLACDE LNKLVEILEG | 300 |
| SFEKEGGAIG YAPGFQADVD DTAKTISTLA VLGRDATPRQ MIKVFEANTH FRTYPGERDP | 360 |
| SLTANCNALS ALLHQPDAAM YGSQIQKITK FVCDYWWKSD GKIKDKWNTC YLYPSVLLVE | 420 |
| VLVDLVSLLE QGKLPDVLDQ ELQYRVAITL FQACLRPLLD QDAEGSWNKS IEATAYGILI | 480 |
| LTEARRVCFF DRLSEPLNEA IRRGIAFADS MSGTEAQLNY IWIEKVSYAP ALLTKSYLLA | 540 |
| ARWAAKSPLG ASVGSSLWTP PREGLDKHVR LFHQAELFRS LPEWELRASM IEAALFTPLL | 600 |
| RAHRLDVFPR QDVGEDKYLD VVPFFWTAAN NRDRTYASTL FLYDMCFIAM LNFQLDEFME | 660 |
| ATAGILFRDH MDDLRQLIHD LLAEKTSPKS SGRSSQGTKD ADSGIEEDVS MSDSASDSQD | 720 |
| RSPEYDLVFS ALSTFTKHVL QHPSIQSASV WDRKLLAREM KAYLLAHIQQ AEDSTPLSEL | 780 |
| KDVPQKTDVT RVSTSTTTFF NWVRTTSADH ISCPYSFHFV ACHLGAALSP KGSNGDCYPS | 840 |
| AGEKFLAAAV CRHLATMCRM YNDLGSAERD SDEGNLNSLD FPEFADSAGN GGIEIQKAAL | 900 |
| LRLAEFERDS YLEAFRRLQD ESNRVHGPAG GDEARLSRRR MAILEFFAQQ VDLYGQVYVI | 960 |
| RDISARIPKN EVEKKRKLDD AFN | 983 |

SEQ ID NO: 55
Artificial Sequence

| | |
|---|---|
| atggcttcta gtacacttat ccaaaacaga tcatgtggcg tcacatcatc tatgtcaagt | 60 |
| tttcaaatct tcagaggtca accactaaga tttcctggca ctagaacccc agctgcagtt | 120 |
| caatgcttga aaaagaggag atgccttagg ccaaccgaat ccgtactaga atcatctcct | 180 |
| ggctctggtt catatagaat agtaactggc ccttctggaa ttaaccctag ttctaacggg | 240 |
| cacttgcaag agggttcctt gactcacagg ttaccaatac caatggaaaa atctatcgat | 300 |
| aacttccaat ctactctata tgtgtcagat atttggtctg aaacactaca gagaactgaa | 360 |
| tgtttgctac aagtaactga aaacgtccag atgaatgagt ggattgagga aattagaatg | 420 |
| tactttagaa atatgacttt aggtgaaatt tccatgtccc cttacgacac tgcttgggtg | 480 |
| gctagagttc cagcgttgga cggttctcat gggcctcaat tccacagatc tttgcaatgg | 540 |
| attatcgaca accaattacc agatggggac tggggcgaac cttctctttt cttgggttac | 600 |
| gatagagttt gtaatacttt agcctgtgtg attgcgttga aaacatgggg tgttggggca | 660 |
| caaaacgttg aaagaggaat tcagttccta caatctaaca tatacaagat ggaggaagat | 720 |
| gacgctaatc atatgccaat aggattcgaa atcgtattcc ctgctatgat ggaagatgcc | 780 |
| aaagcattag gtttggattt gccatacgat gctactattt tgcaacagat ttcagccgaa | 840 |
| agagagaaaa agatgaaaaa gatcccaatg gcaatggtgt acaaataccc aaccacttta | 900 |
| cttcactcct tagaaggctt gcatagagaa gttgattgga ataagttgtt acaattacaa | 960 |
| tctgaaaatg gtagttttct ttattcacct gcttcaaccg catgcgcctt aatgtacact | 1020 |
| aaggacgtta aatgttttga ttacttaaac cagttgttga tcaagttcga ccacgcatgc | 1080 |
| ccaaatgtat atccagtcga tctattcgaa agattatgga tggttgacag attgcagaga | 1140 |
| ttagggatct ccagatactt tgaaagagag attagagatt gtttacaata cgtctacaga | 1200 |
| tattggaaag attgtggaat cggatgggct tctaactctt ccgtacaaga tgttgatgat | 1260 |
| acagccatgg cgtttagact tttaaggact catggtttcg acgtaaagga agattgcttt | 1320 |
| agacagtttt tcaaggacgg agaattcttc tgcttcgcag gccaatcatc tcaagcagtt | 1380 |
| acaggcatgt ttaatctttc aagagccagt caaacattgt ttccaggaga atctttattg | 1440 |
| aaaaaggcta gaaccttctc tagaaacttc ttgagaacaa agcatgagaa caacgaatgt | 1500 |
| ttcgataaat ggatcattac taaagatttg gctggtgaag tcgagtataa cttgaccttc | 1560 |
| ccatggtatg cctctttgcc tagattagaa cataggacat acttagatca atatggaatc | 1620 |
| gatgatatct ggataggcaa atctttatac aaaatgcctg ctgttaccaa cgaagttttc | 1680 |
| ctaaagttgg caaaggcaga ctttaacatg tgtcaagctc tacacaaaaa ggaattggaa | 1740 |
| caagtgataa agtggaacgc gtcctgtcaa ttcagagatc ttgaattcgc cagacaaaaa | 1800 |
| tcagtagaat gctattttgc tggtgcagcc acaatgttcg aaccagaaat ggttcaagct | 1860 |
| agattagtct gggcaagatg ttgtgtattg acaactgtct tagacgatta ctttgaccac | 1920 |
| gggacacctg ttgaggaact tagagtgttt gttcaagctg tcagaacatg gaatccagag | 1980 |
| ttgatcaacg gtttgccaga gcaagctaaa atcttgttta tgggcttata caaaacagtt | 2040 |
| aacacaattg cagaggaagc attcatggca cagaaaagag acgtccatca tcatttgaaa | 2100 |
| cactattggg acaagttgat aacaagtgcc ctaaaggagg ccgaatgggc agagtcaggt | 2160 |
| tacgtcccaa catttgatga atacatggaa gtagctgaaa tttctgttgc tctagaacca | 2220 |
| attgtctgta gtaccttgtt ctttgcgggt catagactag atgaggatgt tctagatagt | 2280 |
| tacgattacc atctagttat gcatttggta aacagagtcg gtagaatctt gaatgatata | 2340 |
| caaggcatga agagggaggc ttcacaaggt aagatctcat cagttcaaat ctacatggag | 2400 |
| gaacatccat ctgttccatc tgaggccatg gcgatcgctc atcttcaaga gttagttgat | 2460 |
| aattcaatgc agcaattgac atacgaagtt cttaggttca ctgcggttcc aaaaagttgt | 2520 |
| aagagaatcc acttgaatat ggctaaaatc atgcatgcct tctacaagga tactgatgga | 2580 |
| ttctcatccc ttactgcaat gacaggattc gtcaaaaagg ttcttttcga acctgtgcct | 2640 |
| gagtaa | 2646 |

SEQ ID NO: 56
Physcomitrella patens

| | |
|---|---|
| MASSTLIQNR SCGVTSSMSS FQIFRGQPLR FPGTRTPAAV QCLKKRRCLR PTESVLESSP | 60 |
| GSGSYRIVTG PSGINPSSNG HLQEGSLTHR LPIPMEKSID NFQSTLYVSD IWSETLQRTE | 120 |
| CLLQVTENVQ MNEWIEEIRM YFRNMTLGEI SMSPYDTAWV ARVPALDGSH GPQFHRSLQW | 180 |
| IIDNQLPDGD WGEPSLFLGY DRVCNTLACV IALKTWGVGA QNVERGIQFL QSNIYKMEED | 240 |
| DANHMPIGFE IVFPAMMEDA KALGLDLPYD ATILQQISAE REKKMKKIPM AMVYKYPTTL | 300 |
| LHSLEGLHRE VDWNKLLQLQ SENGSFLYSP ASTACALMYT KDVKCFDYLN QLLIKFDHAC | 360 |
| PNVYPVDLFE RLWMVDRLQR LGISRYFERE IRDCLQYVYR YWKDCGIGWA SNSSVQDVDD | 420 |
| TAMAFRLLRT HGFDVKEDCF RQFFKDGEFF CFAGQSSQAV TGMFNLSRAS QTLFPGESLL | 480 |
| KKARTFSRNF LRTKHENNEC FDKWIITKDL AGEVEYNLTF PWYASLPRLE HRTYLDQYGI | 540 |
| DDIWIGKSLY KMPAVTNEVF LKLAKADFNM CQALHKKELE QVIKWNASCQ FRDLEFARQK | 600 |
| SVECYFAGAA TMFEPEMVQA RLVWARCCVL TTVLDDYFDH GTPVEELRVF VQAVRTWNPE | 660 |
| LINGLPEQAK ILFMGLYKTV NTIAEEAFMA QKRDVHHHLK HYWDKLITSA LKEAEWAESG | 720 |
| YVPTFDEYME VAEISVALEP IVCSTLFFAG HRLDEDVLDS YDYHLVMHLV NRVGRILNDI | 780 |
| QGMKREASQG KISSVQIYME EHPSVPSEAM AIAHLQELVD NSMQQLTYEV LRFTAVPKSC | 840 |
| KRIHLNMAKI MHAFYKDTDG FSSLTAMTGF VKKVLFEPVP E | 881 |

SEQ ID NO: 57
Artificial Sequence

| | |
|---|---|
| atgcctggta aaattgaaaa tggtacccca aaggacctca agactggaaa tgattttgtt | 60 |
| tctgctgcta agagtttact agatcgagct ttcaaaagtc atcattccta ctacggatta | 120 |
| tgctcaactt catgtcaagt ttatgataca gcttgggttg caatgattcc aaaaacaaga | 180 |
| gataatgtaa aacagtggtt gtttccagaa tgtttccatt acctcttaaa aacacaagcc | 240 |
| gcagatggct catggggttc attgcctaca acacagacag cgggtatcct agatacagcc | 300 |
| tcagctgtgc tggcattatt gtgccacgca caagagcctt tacaaatatt ggatgtatct | 360 |
| ccagatgaaa tggggttgag aatagaacac ggtgtcacat ccttgaaacg tcaattagca | 420 |
| gtttggaatg atgtggagga caccaaccat attggcgtcg agtttatcat accagcctta | 480 |
| ctttccatgc tagaaaagga attagatgtt ccatcttttg aatttccatg taggtccatc | 540 |
| ttagagagaa tgcacgggga gaaattaggt catttcgacc tggaacaagt ttacggcaag | 600 |
| ccaagctcat tgttgcactc attggaagca tttctcggta agctagattt tgatcgacta | 660 |
| tcacatcacc tataccacgg cagtatgatg gcatctccat cttcaacggc tgcttatctt | 720 |
| attggggcta caaaatggga tgacgaagcc gaagattacc taagacatgt aatgcgtaat | 780 |
| ggtgcaggac atgggaatgg aggtatttct ggtacatttc caactactca tttcgaatgt | 840 |
| agctggatta tagcaacgtt gttaaaggtt ggctttactt tgaagcaaat tgacggcgat | 900 |
| ggcttaagag gtttatcaac catcttactt gaggcgcttc gtgatgagaa tggtgtcata | 960 |
| ggctttgccc ctagaacagc agatgtagat gacacagcca aagctctatt ggccttgtca | 1020 |
| ttggtaaacc agccagtgtc acctgatatc atgattaagg tctttgaggg caaagaccat | 1080 |
| tttaccactt ttggttcaga aagagatcca tcattgactt ccaacctgca cgtcctttta | 1140 |
| tctttactta aacaatctaa cttgtctcaa taccatcctc aaatcctcaa aacaacatta | 1200 |
| ttcacttgta gatggtggtg gggttccgat cattgtgtca aagacaaatg gaatttgagt | 1260 |
| cacctatatc caactatgtt gttggttgaa gccttcactg aagtgctcca tctcattgac | 1320 |
| ggtggtgaat tgtctagtct gtttgatgaa tcctttaagt gtaagattgg tcttagcatc | 1380 |
| tttcaagcgg tacttagaat aatcctcacc caagacaacg acggctcttg gagaggatac | 1440 |
| agagaacaga cgtgttacgc aatattggct ttagttcaag cgagacatgt atgctttttc | 1500 |
| actcacatgg ttgacagact gcaatcatgt gttgatcgag gtttctcatg gttgaaatct | 1560 |
| tgctcttttc attctcaaga cctgacttgg acctctaaaa cagcttatga agtgggtttc | 1620 |
| gtagctgaag catataaact agctgcttta caatctgctt ccctggaggt tcctgctgcc | 1680 |
| accattggac attctgtcac gtctgccgtt ccatcaagtg atcttgaaaa atacatgaga | 1740 |
| ttggtgagaa aaactgcgtt attctctcca ctggatgagt ggggtctaat ggcttctatc | 1800 |
| atcgaatctt catttttcgt accattactg caggcacaaa gagttgaaat ataccctaga | 1860 |
| gataatatca aggtggacga agataagtac ttgtctatta tcccattcac atgggtcgga | 1920 |
| tgcaataata ggtctagaac tttcgcaagt aacagatggc tatacgatat gatgtacctt | 1980 |
| tcattactcg gctatcaaac cgacgagtac atggaagctg tagctgggcc agtgtttggg | 2040 |
| gatgtttcct tgttacatca aacaattgat aaggtgattg ataatacaat gggtaacctt | 2100 |
| gcgagagcca atggaacagt acacagtggt aatggacatc agcacgaatc tcctaatata | 2160 |
| ggtcaagtcg aggacacctt gactcgtttc acaaattcag tcttgaatca caaagacgtc | 2220 |
| cttaactcta gctcatctga tcaagatact ttgagaagag agtttagaac attcatgcac | 2280 |
| gctcatataa cacaaatcga agataactca cgattcagta agcaagcctc atccgatgcg | 2340 |
| ttttcctctc ctgaacaatc ttactttcaa tgggtgaact caactggtgg ctcacatgtc | 2400 |
| gcttgcgcct attcatttgc cttctctaat tgcctcatgt ctgcaaattt gttgcagggt | 2460 |
| aaagacgcat ttccaagcgg aacgcaaaag tacttaatct cctctgttat gagacatgcc | 2520 |
| acaaacatgt gtagaatgta taacgacttt ggctctattg ccagagacaa cgctgagaga | 2580 |
| aatgttaata gtattcattt tcctgagttt actctctgta acggaacttc tcaaaaccta | 2640 |
| gatgaaagga aggaaagact tctgaaaatc gcaacttacg aacaagggta tttggataga | 2700 |
| gcactagagg ccttggaaag acagagtaga gatgatgccg gagacagagc tggatctaaa | 2760 |
| gatatgagaa agttgaaaat cgttaagtta ttctgtgatg ttacggactt atacgatcag | 2820 |
| ctctacgtta tcaaagattt gtcatcctct atgaagtaa | 2859 |

SEQ ID NO: 58
Gibberella fujikuroi

| | |
|---|---|
| MPGKIENGTP KDLKTGNDFV SAAKSLLDRA FKSHHSYYGL CSTSCQVYDT AWVAMIPKTR | 60 |
| DNVKQWLFPE CFHYLLKTQA ADGSWGSLPT TQTAGILDTA SAVLALLCHA QEPLQILDVS | 120 |
| PDEMGLRIEH GVTSLKRQLA VWNDVEDTNH IGVEFIIPAL LSMLEKELDV PSFEFPCRSI | 180 |
| LERMHGEKLG HFDLEQVYGK PSSLLHSLEA FLGKLDFDRL SHHLYHGSMM ASPSSTAAYL | 240 |
| IGATKWDDEA EDYLRHVMRN GAGHGNGGIS GTFPTTHFEC SWIIATLLKV GFTLKQIDGD | 300 |
| GLRGLSTILL EALRDENGVI GFAPRTADVD DTAKALLALS LVNQPVSPDI MIKVFEGKDH | 360 |
| FTTFGSERDP SLTSNLHVLL SLLKQSNLSQ YHPQILKTTL FTCRWWWGSD HCVKDKWNLS | 420 |
| HLYPTMLLVE AFTEVLHLID GGELSSLFDE SFKCKIGLSI FQAVLRIILT QDNDGSWRGY | 480 |
| REQTCYAILA LVQARHVCFF THMVDRLQSC VDRGFSWLKS CSFHSQDLTW TSKTAYEVGF | 540 |
| VAEAYKLAAL QSASLEVPAA TIGHSVTSAV PSSDLEKYMR LVRKTALFSP LDEWGLMASI | 600 |
| IESSFFVPLL QAQRVEIYPR DNIKVDEDKY LSIIPFTWVG CNNRSRTFAS NRWLYDMMYL | 660 |
| SLLGYQTDEY MEAVAGPVFG DVSLLHQTID KVIDNTMGNL ARANGTVHSG NGHQHESPNI | 720 |
| GQVEDTLTRF TNSVLNHKDV LNSSSSDQDT LRREFRTFMH AHITQIEDNS RFSKQASSDA | 780 |
| FSSPEQSYFQ WVNSTGGSHV ACAYSFAFSN CLMSANLLQG KDAFPSGTQK YLISSVMRHA | 840 |
| TNMCRMYNDF GSIARDNAER NVNSIHFPEF TLCNGTSQNL DERKERLLKI ATYEQGYLDR | 900 |
| ALEALERQSR DDAGDRAGSK DMRKLKIVKL FCDVTDLYDQ LYVIKDLSSS MK | 952 |

SEQ ID NO: 59
Artificial Sequence

| | |
|---|---|
| atggatgctg tgacgggttt gttaactgtc ccagcaaccg ctataactat tggtggaact | 60 |
| gctgtagcat tggcggtagc gctaatcttt tggtacctga aatcctacac atcagctaga | 120 |
| agatcccaat caaatcatct tccaagagtg cctgaagtcc caggtgttcc attgttagga | 180 |
| aatctgttac aattgaagga gaaaaagcca tacatgactt ttacgagatg ggcagcgaca | 240 |
| tatggaccta tctatagtat caaaactggg gctacaagta tggttgtggt atcatctaat | 300 |
| gagatagcca aggaggcatt ggtgaccaga ttccaatcca tatctacaag gaacttatct | 360 |
| aaagccctga aagtacttac agcagataag acaatggtcg caatgtcaga ttatgatgat | 420 |
| tatcataaaa cagttaagag acacatactg accgccgtct tgggtcctaa tgcacagaaa | 480 |
| aagcatagaa ttcacagaga tatcatgatg gataacatat ctactcaact tcatgaattc | 540 |
| gtgaaaaaca acccagaaca ggaagaggta gaccttagaa aaatctttca atctgagtta | 600 |
| ttcggcttag ctatgagaca agccttagga aaggatgttg aaagtttgta cgttgaagac | 660 |
| ctgaaaatca ctatgaatag agacgaaatc tttcaagtcc ttgttgttga tccaatgatg | 720 |
| ggagcaatcg atgttgattg gagagacttc tttccatacc taaagtgggt cccaaacaaa | 780 |
| aagttcgaaa atactattca acaaatgtac atcagaagag aagctgttat gaaatcttta | 840 |
| atcaaagagc acaaaaagag aatagcgtca ggcgaaaagc taaatagtta tatcgattac | 900 |
| cttttatctg aagctcaaac tttaaccgat cagcaactat tgatgtcctt gtgggaacca | 960 |
| atcattgaat cttcagatac aacaatggtc acaacagaat gggcaatgta cgaattagct | 1020 |
| aaaaacccta aattgcaaga taggttgtac agagacatta agtccgtctg tggatctgaa | 1080 |
| aagataaccg aagagcatct atcacagctg ccttacatta cagctatttt ccacgaaaca | 1140 |
| ctgagaagac actcaccagt tcctatcatt cctctaagac atgtacatga agataccgtt | 1200 |
| ctaggcggct accatgttcc tgctggcaca gaacttgccg ttaacatcta cggttgcaac | 1260 |
| atggacaaaa acgtttggga aaatccagag gaatggaacc cagaaagatt catgaaagag | 1320 |
| aatgagacaa ttgattttca aaagacgatg gccttcggtg gtggtaagag agtttgtgct | 1380 |
| ggttccttgc aagccctttt aactgcatct attgggattg ggagaatggt tcaagagttc | 1440 |
| gaatggaaac tgaaggatat gactcaagag gaagtgaaca cgataggcct aactacacaa | 1500 |
| atgttaagac cattgagagc tattatcaaa cctaggatct aa | 1542 |

SEQ ID NO: 60
Stevia rebaudiana

| | |
|---|---|
| MDAVTGLLTV PATAITIGGT AVALAVALIF WYLKSYTSAR RSQSNHLPRV PEVPGVPLLG | 60 |
| NLLQLKEKKP YMTFTRWAAT YGPIYSIKTG ATSMVVVSSN EIAKEALVTR FQSISTRNLS | 120 |
| KALKVLTADK TMVAMSDYDD YHKTVKRHIL TAVLGPNAQK KHRIHRDIMM DNISTQLHEF | 180 |
| VKNNPEQEEV DLRKIFQSEL FGLAMRQALG KDVESLYVED LKITMNRDEI FQVLVVDPMM | 240 |
| GAIDVDWRDF FPYLKWVPNK KFENTIQQMY IRREAVMKSL IKEHKKRIAS GEKLNSYIDY | 300 |
| LLSEAQTLTD QQLLMSLWEP IIESSDTTMV TTEWAMYELA KNPKLQDRLY RDIKSVCGSE | 360 |
| KITEEHLSQL PYITAIFHET LRRHSPVPII PLRHVHEDTV LGGYHVPAGT ELAVNIYGCN | 420 |
| MDKNVWENPE EWNPERFMKE NETIDFQKTM AFGGGKRVCA GSLQALLTAS IGIGRMVQEF | 480 |
| EWKLKDMTQE EVNTIGLTTQ MLRPLRAIIK PRI | 513 |

SEQ ID NO: 61
Artificial Sequence

| | |
|---|---|
| aagcttacta gtaaaatgga cggtgtcatc gatatgcaaa ccattccatt gagaaccgct | 60 |
| attgctattg gtggtactgc tgttgctttg gttgttgcat tatacttttg gttcttgaga | 120 |
| tcctacgctt ccccatctca tcattctaat catttgccac cagtacctga agttccaggt | 180 |
| gttccagttt tgggtaattt gttgcaattg aaagaaaaaa agccttacat gaccttcacc | 240 |
| aagtgggctg aaatgtatgg tccaatctac tctattagaa ctggtgctac ttccatggtt | 300 |
| gttgtctctt ctaacgaaat cgccaaagaa gttgttgtta ccagattccc atctatctct | 360 |
| accagaaaat tgtcttacgc cttgaaggtt ttgaccgaag ataagtctat ggttgccatg | 420 |
| tctgattatc acgattacca taagaccgtc aagagacata ttttgactgc tgttttgggt | 480 |
| ccaaacgccc aaaaaaagtt tagagcacat agagacacca tgatggaaaa cgtttccaat | 540 |
| gaattgcatg ccttcttcga aaagaaccca aatcaagaag tcaacttgag aaagatcttc | 600 |
| caatcccaat tattcggttt ggctatgaag caagccttgg gtaaagatgt tgaatccatc | 660 |
| tacgttaagg atttggaaac caccatgaag agagaagaaa tcttcgaagt tttggttgtc | 720 |
| gatccaatga tgggtgctat tgaagttgat tggagagact ttttcccata cttgaaatgg | 780 |
| gttccaaaca agtccttcga aaacatcatc catagaatgt acactagaag agaagctgtt | 840 |
| atgaaggcct tgatccaaga acacaagaaa agaattgcct ccggtgaaaa cttgaactcc | 900 |
| tacattgatt acttgttgtc tgaagcccaa accttgaccg ataagcaatt attgatgtct | 960 |
| ttgtgggaac ctattatcga atcttctgat accactatgg ttactactga atgggctatg | 1020 |
| tacgaattgg ctaagaatcc aaacatgcaa gacagattat acgaagaaat ccaatccgtt | 1080 |
| tgcggttccg aaaagattac tgaagaaaac ttgtcccaat tgccatactt gtacgctgtt | 1140 |
| ttccaagaaa ctttgagaaa gcactgtcca gttcctatta tgccattgag atatgttcac | 1200 |
| gaaaacaccg ttttgggtgg ttatcatgtt ccagctggta ctgaagttgc tattaacatc | 1260 |
| tacggttgca acatggataa gaaggtctgg gaaaatccag aagaatggaa tccagaaaga | 1320 |
| ttcttgtccg aaaaagaatc catggacttg tacaaaacta tggcttttgg tggtggtaaa | 1380 |
| agagtttgcg ctggttcttt acaagccatg gttatttctt gcattggtat cggtagattg | 1440 |
| gtccaagatt ttgaatggaa gttgaaggat gatgccgaag aagatgttaa cactttgggt | 1500 |
| ttgactaccc aaaagttgca tccattattg gccttgatta acccaagaaa gtaactcgag | 1560 |
| ccgcgg | 1566 |

SEQ ID NO: 62
Lactuca sativa

| | |
|---|---|
| MDGVIDMQTI PLRTAIAIGG TAVALVVALY FWFLRSYASP SHHSNHLPPV PEVPGVPVLG | 60 |
| NLLQLKEKKP YMTFTKWAEM YGPIYSIRTG ATSMVVVSSN EIAKEVVVTR FPSISTRKLS | 120 |
| YALKVLTEDK SMVAMSDYHD YHKTVKRHIL TAVLGPNAQK KFRAHRDTMM ENVSNELHAF | 180 |
| FEKNPNQEVN LRKIFQSQLF GLAMKQALGK DVESIYVKDL ETTMKREEIF EVLVVDPMMG | 240 |
| AIEVDWRDFF PYLKWVPNKS FENIIHRMYT RREAVMKALI QEHKKRIASG ENLNSYIDYL | 300 |
| LSEAQTLTDK QLLMSLWEPI IESSDTTMVT TEWAMYELAK NPNMQDRLYE EIQSVCGSEK | 360 |
| ITEENLSQLP YLYAVFQETL RKHCPVPIMP LRYVHENTVL GGYHVPAGTE VAINIYGCNM | 420 |
| DKKVWENPEE WNPERFLSEK ESMDLYKTMA FGGGKRVCAG SLQAMVISCI GIGRLVQDFE | 480 |
| WKLKDDAEED VNTLGLTTQK LHPLLALINP RK | 512 |

SEQ ID NO: 63
Rubus suavissimus

| | |
|---|---|
| atggccaccc tccttgagca tttccaagct atgccctttg ccatccctat tgcactggct | 60 |
| gctctgtctt ggctgttcct cttttacatc aaagtttcat tcttttccaa caagagtgct | 120 |
| caggctaagc tccctcctgt gccagtggtt cctgggctgc cggtgattgg gaatttactg | 180 |
| caactcaagg agaagaaacc ctaccagact tttacaaggt gggctgagga gtatggacca | 240 |
| atctattcta tcaggactgg tgcttccacc atggtcgttc tcaataccac ccaagttgca | 300 |
| aaagaggcca tggtgaccag atatttatcc atctcaacca gaaagctatc aaacgcacta | 360 |
| aagattctta ctgctgataa atgtatggtt gcaataagtg actacaacga ttttcacaag | 420 |
| atgataaagc gatacatact ctcaaatgtt cttggaccta gtgctcagaa gcgtcaccgg | 480 |
| agcaacagag ataccttgag agctaatgtc tgcagccgat tgcattctca agtaaagaac | 540 |
| tctcctcgag aagctgtgaa tttcagaaga gtttttgagt gggaactctt tggaattgca | 600 |
| ttgaagcaag cctttggaaa ggacatagaa aagcccattt atgtggagga acttggcact | 660 |
| acactgtcaa gagatgagat ctttaaggtt ctagtgcttg acataatgga gggtgcaatt | 720 |
| gaggttgatt ggagagattt cttcccttac ctgagatgga ttccgaatac gcgcatggaa | 780 |
| acaaaaattc agcgactcta tttccgcagg aaagcagtga tgactgccct gatcaacgag | 840 |
| cagaagaagc gaattgcttc aggagaggaa atcaactgtt atatcgactt cttgcttaag | 900 |
| gaagggaaga cactgacaat ggaccaaata agtatgttgc tttgggagac ggttattgaa | 960 |
| acagcagata ctacaatggt aacgacagaa tgggctatgt atgaagttgc taaagactca | 1020 |
| aagcgtcagg atcgtctcta tcaggaaatc caaaaggttt gtggatcgga gatggttaca | 1080 |
| gaggaatact tgtcccaact gccgtacctg aatgcagttt tccatgaaac gctaaggaag | 1140 |
| cacagtccgg ctgcgttagt tcctttaaga tatgcacatg aagataccca actaggaggt | 1200 |
| tactacattc cagctggaac tgagattgct ataaacatat acgggtgtaa catggacaag | 1260 |
| catcaatggg aaagccctga ggaatggaaa ccggagagat ttttggaccc gaaatttgat | 1320 |
| cctatggatt tgtacaagac catggctttt ggggctggaa agagggtatg tgctggttct | 1380 |
| cttcaggcaa tgttaatagc gtgcccgacg attggtaggc tggtgcagga gtttgagtgg | 1440 |
| aagctgagag atggagaaga agaaaatgta gatactgttg ggctcaccac tcacaaacgc | 1500 |
| tatccaatgc atgcaatcct gaagccaaga agtta | 1535 |

SEQ ID NO: 64
Artificial Sequence

| | |
|---|---|
| atggctacct tgttggaaca ttttcaagct atgccattcg ctattccaat tgctttggct | 60 |
| gctttgtctt ggttgttttt gttctacatc aaggtttctt tcttctccaa caaatccgct | 120 |
| caagctaaat tgccaccagt tccagttgtt ccaggtttgc cagttattgg taatttgttg | 180 |
| caattgaaag aaaagaagcc ataccaaacc ttcactagat gggctgaaga atatggtcca | 240 |
| atctactcta ttagaactgg tgcttctact atggttgtct tgaacactac tcaagttgcc | 300 |
| aaagaagcta tggttaccag atacttgtct atctctacca gaaagttgtc caacgccttg | 360 |
| aaaattttga ccgctgataa gtgcatggtt gccatttctg attacaacga tttccacaag | 420 |
| atgatcaaga gatatatctt gtctaacgtt ttgggtccat ctgcccaaaa aagacataga | 480 |
| tctaacagag ataccttgag agccaacgtt tgttctagat tgcattccca agttaagaac | 540 |
| tctccaagag aagctgtcaa ctttagaaga gttttcgaat gggaattatt cggtatcgct | 600 |
| ttgaaacaag ccttcggtaa ggatattgaa aagccaatct acgtcgaaga attgggtact | 660 |
| actttgtcca gagatgaaat cttcaaggtt ttggtcttgg acattatgga aggtgccatt | 720 |
| gaagttgatt ggagagattt tttcccatac ttgcgttgga ttccaaacac cagaatggaa | 780 |
| actaagatcc aaagattata ctttagaaga aaggccgtta tgaccgcctt gattaacgaa | 840 |
| caaaagaaaa gaattgcctc cggtgaagaa atcaactgct acatcgattt cttgttgaaa | 900 |
| gaaggtaaga ccttgaccat ggaccaaatc tctatgttgt tgtgggaaac cgttattgaa | 960 |
| actgctgata ccacaatggt tactactgaa tgggctatgt acgaagttgc taaggattct | 1020 |
| aaaagacaag acagattata ccaagaaatc caaaaggtct gcggttctga aatggttaca | 1080 |
| gaagaatact tgtcccaatt gccatacttg aatgctgttt tccacgaaac tttgagaaaa | 1140 |
| cattctccag ctgctttggt tccattgaga tatgctcatg aagatactca attgggtggt | 1200 |
| tattacattc cagccggtac tgaaattgcc attaacatct acggttgcaa catggacaaa | 1260 |
| caccaatggg aatctccaga agaatggaag ccagaaagat ttttggatcc taagtttgac | 1320 |
| ccaatggact tgtacaaaac tatggctttt ggtgctggta aaagagtttg cgctggttct | 1380 |
| ttacaagcta tgttgattgc ttgtccaacc atcggtagat tggttcaaga atttgaatgg | 1440 |
| aagttgagag atggtgaaga agaaaacgtt gatactgttg gtttgaccac ccataagaga | 1500 |
| tatccaatgc atgctatttt gaagccaaga tcttaa | 1536 |

SEQ ID NO: 65
Artificial Sequence

| | |
|---|---|
| aagcttacta gtaaaatggc ctccatcacc catttcttac aagattttca agctactcca | 60 |
| ttcgctactg cttttgctgt tggtggtgtt tctttgttga tattcttctt cttcatccgt | 120 |
| ggtttccact ctactaagaa aaacgaatat tacaagttgc caccagttcc agttgttcca | 180 |
| ggtttgccag ttgttggtaa tttgttgcaa ttgaaagaaa agaagccata caagactttc | 240 |
| ttgagatggg ctgaaattca tggtccaatc tactctatta gaactggtgc ttctaccatg | 300 |
| gttgttgtta actctactca tgttgccaaa gaagctatgg ttaccagatt ctcttcaatc | 360 |
| tctaccagaa agttgtccaa ggctttggaa ttattgacct ccaacaaatc tatggttgcc | 420 |
| acctctgatt acaacgaatt tcacaagatg gtcaagaagt acatcttggc cgaattattg | 480 |
| ggtgctaatg ctcaaaagag acacagaatt catagagaca ccttgatcga aaacgtcttg | 540 |
| aacaaattgc atgcccatac caagaattct ccattgcaag ctgttaactt cagaaagatc | 600 |
| ttcgaatctg aattattcgg tttggctatg aagcaagcct tgggttatga tgttgattcc | 660 |
| ttgttcgttg aagaattggg tactaccttg tccagagaag aaatctacaa cgttttggtc | 720 |
| agtgacatgt tgaagggtgc tattgaagtt gattggagag actttttccc atacttgaaa | 780 |
| tggatcccaa acaagtcctt cgaaatgaag attcaaagat tggcctctag aagacaagcc | 840 |
| gttatgaact ctattgtcaa agaacaaaag aagtccattg cctctggtaa gggtgaaaac | 900 |
| tgttacttga attacttgtt gtccgaagct aagactttga ccgaaaagca aatttccatt | 960 |
| ttggcctggg aaaccattat tgaaactgct gatacaactg ttgttaccac tgaatgggct | 1020 |
| atgtacgaat tggctaaaaa cccaaagcaa caagacagat tatacaacga aatccaaaac | 1080 |
| gtctgcggta ctgataagat taccgaagaa catttgtcca agttgcctta cttgtctgct | 1140 |
| gtttttcacg aaaccttgag aaagtattct ccatctccat tggttccatt gagatacgct | 1200 |
| catgaagata ctcaattggg tggttattat gttccagccg gtactgaaat tgctgttaat | 1260 |
| atctacggtt gcaacatgga caagaatcaa tgggaaactc cagaagaatg gaagccagaa | 1320 |
| agatttttgg acgaaaagta cgatccaatg gacatgtaca agactatgtc ttttggttcc | 1380 |
| ggtaaaagag tttgcgctgg ttctttacaa gctagtttga ttgcttgtac ctccatcggt | 1440 |
| agattggttc aagaatttga atggagattg aaagacggtg aagttgaaaa cgttgatacc | 1500 |
| ttgggtttga ctacccataa gttgtatcca atgcaagcta tcttgcaacc tagaaactga | 1560 |
| ctcgagccgc gg | 1572 |

SEQ ID NO: 66
Castanea mollissima

| | |
|---|---|
| MASITHFLQD FQATPFATAF AVGGVSLLIF FFFIRGFHST KKNEYYKLPP VPVVPGLPVV | 60 |
| GNLLQLKEKK PYKTFLRWAE IHGPIYSIRT GASTMVVVNS THVAKEAMVT RFSSISTRKL | 120 |
| SKALELLTSN KSMVATSDYN EFHKMVKKYI LAELLGANAQ KRHRIHRDTL IENVLNKLHA | 180 |
| HTKNSPLQAV NFRKIFESEL FGLAMKQALG YDVDSLFVEE LGTTLSREEI YNVLVSDMLK | 240 |
| GAIEVDWRDF FPYLKWIPNK SFEMKIQRLA SRRQAVMNSI VKEQKKSIAS GKGENCYLNY | 300 |
| LLSEAKTLTE KQISILAWET IIETADTTVV TTEWAMYELA KNPKQQDRLY NEIQNVCGTD | 360 |
| KITEEHLSKL PYLSAVFHET LRKYSPSPLV PLRYAHEDTQ LGGYYVPAGT EIAVNIYGCN | 420 |
| MDKNQWETPE EWKPERFLDE KYDPMDMYKT MSFGSGKRVC AGSLQASLIA CTSIGRLVQE | 480 |
| FEWRLKDGEV ENVDTLGLTT HKLYPMQAIL QPRN | 514 |

SEQ ID NO: 67
Artificial Sequence

| | |
|---|---|
| atgatttcct tgttgttggg ttttgttgtc tcctccttct tgtttatctt cttcttgaaa | 60 |
| aaattgttgt tcttcttcag tcgtcacaaa atgtccgaag tttctagatt gccatctgtt | 120 |
| ccagttccag gttttccatt gattggtaac ttgttgcaat tgaaagaaaa gaagccacac | 180 |
| aagactttca ccaagtggtc tgaattatat ggtccaatct actctatcaa gatgggttcc | 240 |
| tcttctttga tcgtcttgaa ctctattgaa accgccaaag aagctatggt cagtagattc | 300 |
| tcttcaatct ctaccagaaa gttgtctaac gctttgactg ttttgacctg caacaaatct | 360 |
| atggttgcta cctctgatta cgatgacttt cataagttcg tcaagagatg cttgttgaac | 420 |
| ggtttgttgg gtgctaatgc tcaagaaaga aaaagacatt acagagatgc cttgatcgaa | 480 |
| aacgttacct ctaaattgca tgcccatacc agaaatcatc cacaagaacc agttaacttc | 540 |
| agagccattt tcgaacacga attattcggt gttgctttga aacaagcctt cggtaaagat | 600 |
| gtcgaatcca tctatgtaaa agaattgggt gtcaccttgt ccagagatga aattttcaag | 660 |
| gttttggtcc acgacatgat ggaaggtgct attgatgttg attggagaga tttcttccca | 720 |
| tacttgaaat ggatcccaaa caactctttc gaagccagaa ttcaacaaaa gcacaagaga | 780 |
| agattggctg ttatgaacgc cttgatccaa gacagattga atcaaaacga ttccgaatcc | 840 |
| gatgatgact gctacttgaa tttcttgatg tctgaagcta agaccttgac catggaacaa | 900 |
| attgctattt tggtttggga aaccattatc gaaactgctg ataccacttt ggttactact | 960 |
| gaatgggcta tgtacgaatt ggccaaacat caatctgttc aagatagatt attcaaagaa | 1020 |
| atccaatccg tctgcggtgg tgaaaagatc aaagaagaac aattgccaag attgccttac | 1080 |
| gtcaatggtg tttttcacga aaccttgaga aagtattctc cagctccatt ggttccaatt | 1140 |
| agatacgctc atgaagatac ccaaattggt ggttatcata ttccagccgg ttctgaaatt | 1200 |
| gccattaaca tctacggttg caacatggat aagaagagat gggaaagacc tgaagaatgg | 1260 |
| tggccagaaa gatttttgga agatagatac gaatcctccg acttgcataa gactatggct | 1320 |
| tttggtgctg gtaaaagagt ttgtgctggt gctttacaag ctagtttgat ggctggtatt | 1380 |
| gctatcggta gattggttca agaattcgaa tggaagttga gagatggtga agaagaaaac | 1440 |
| gttgatactt acggtttgac ctcccaaaag ttgtatccat tgatggccat tatcaaccca | 1500 |
| agaagatctt aa | 1512 |

SEQ ID NO: 68
Thellungiella halophila

| | |
|---|---|
| MASMISLLLG FVVSSFLFIF FLKKLLFFFS RHKMSEVSRL PSVPVPGFPL IGNLLQLKEK | 60 |
| KPHKTFTKWS ELYGPIYSIK MGSSSLIVLN SIETAKEAMV SRFSSISTRK LSNALTVLTC | 120 |
| NKSMVATSDY DDFHKFVKRC LLNGLLGANA QERKRHYRDA LIENVTSKLH AHTRNHPQEP | 180 |
| VNFRAIFEHE LFGVALKQAF GKDVESIYVK ELGVTLSRDE IFKVLVHDMM EGAIDVDWRD | 240 |
| FFPYLKWIPN NSFEARIQQK HKRRLAVMNA LIQDRLNQND SESDDDCYLN FLMSEAKTLT | 300 |
| MEQIAILVWE TIIETADTTL VTTEWAMYEL AKHQSVQDRL FKEIQSVCGG EKIKEEQLPR | 360 |
| LPYVNGVFHE TLRKYSPAPL VPIRYAHEDT QIGGYHIPAG SEIAINIYGC NMDKKRWERP | 420 |
| EEWWPERFLE DRYESSDLHK TMAFGAGKRV CAGALQASLM AGIAIGRLVQ EFEWKLRDGE | 480 |
| EENVDTYGLT SQKLYPLMAI INPRRS | 506 |

SEQ ID NO: 69
Artificial Sequence

| | |
|---|---|
| aagcttacta gtaaaatgga catgatgggt attgaagctg ttccatttgc tactgctgtt | 60 |
| gttttgggtg gtatttcctt ggttgttttg atcttcatca gaagattcgt ttccaacaga | 120 |
| aagagatccg ttgaaggttt gccaccagtt ccagatattc caggtttacc attgattggt | 180 |
| aacttgttgc aattgaaaga aaagaagcca cataagacct ttgctagatg ggctgaaact | 240 |
| tacggtccaa ttttctctat tagaactggt gcttctacca tgatcgtctt gaattcttct | 300 |
| gaagttgcca aagaagctat ggtcactaga ttctcttcaa tctctaccag aaagttgtcc | 360 |
| aacgccttga agattttgac cttcgataag tgtatggttg ccacctctga ttacaacgat | 420 |
| tttcacaaaa tggtcaaggg tttcatcttg agaaacgttt taggtgctcc agcccaaaaa | 480 |
| agacatagat gtcatagaga taccttgatc gaaaacatct ctaagtactt gcatgcccat | 540 |
| gttaagactt ctccattgga accagttgtc ttgaagaaga ttttcgaatc cgaaattttc | 600 |
| ggtttggctt tgaaacaagc cttgggtaag gatatcgaat ccatctatgt tgaagaattg | 660 |
| ggtactacct tgtccagaga agaaattttt gccgttttgg ttgttgatcc aatggctggt | 720 |
| gctattgaag ttgattggag agattttttc ccatacttgt cctggattcc aaacaagtct | 780 |
| atggaaatga agatccaaag aatggatttt agaagaggtg ctttgatgaa ggccttgatt | 840 |
| ggtgaacaaa agaaaagaat cggttccggt gaagaaaaga actcctacat tgatttcttg | 900 |
| ttgtctgaag ctaccacttt gaccgaaaag caaattgcta tgttgatctg ggaaaccatc | 960 |
| atcgaaattt ccgatacaac tttggttacc tctgaatggg ctatgtacga attggctaaa | 1020 |
| gacccaaata gacaagaaat cttgtacaga gaaatccaca aggtttgcgg ttctaacaag | 1080 |
| ttgactgaag aaaacttgtc caagttgcca tacttgaact ctgttttcca cgaaaccttg | 1140 |
| agaaagtatt ctccagctcc aatggttcca gttagatatg ctcatgaaga tactcaattg | 1200 |
| ggtggttacc atattccagc tggttctcaa attgccatta acatctacgg ttgcaacatg | 1260 |
| aacaaaaagc aatgggaaaa tcctgaagaa tggaagccag aaagattctt ggacgaaaag | 1320 |
| tatgacttga tggacttgca taagactatg gcttttggtg gtggtaaaag agtttgtgct | 1380 |
| ggtgctttac aagcaatgtt gattgcttgc acttccatcg gtagattcgt tcaagaattt | 1440 |
| gaatggaagt tgatgggtgg tgaagaagaa aacgttgata ctgttgcttt gacctcccaa | 1500 |
| aaattgcatc caatgcaagc cattattaag gccagagaat gactcgagcc gcgg | 1554 |

SEQ ID NO: 70
Vitis vinifera

| | |
|---|---|
| MDMMGIEAVP FATAVVLGGI SLVVLIFIRR FVSNRKRSVE GLPPVPDIPG LPLIGNLLQL | 60 |
| KEKKPHKTFA RWAETYGPIF SIRTGASTMI VLNSSEVAKE AMVTRFSSIS TRKLSNALKI | 120 |
| LTFDKCMVAT SDYNDFHKMV KGFILRNVLG APAQKRHRCH RDTLIENISK YLHAHVKTSP | 180 |
| LEPVVLKKIF ESEIFGLALK QALGKDIESI YVEELGTTLS REEIFAVLVV DPMAGAIEVD | 240 |
| WRDFFPYLSW IPNKSMEMKI QRMDFRRGAL MKALIGEQKK RIGSGEEKNS YIDFLLSEAT | 300 |
| TLTEKQIAML IWETIIEISD TTLVTSEWAM YELAKDPNRQ EILYREIHKV CGSNKLTEEN | 360 |
| LSKLPYLNSV FHETLRKYSP APMVPVRYAH EDTQLGGYHI PAGSQIAINI YGCNMNKKQW | 420 |
| ENPEEWKPER FLDEKYDLMD LHKTMAFGGG KRVCAGALQA MLIACTSIGR FVQEFEWKLM | 480 |
| GGEEENVDTV ALTSQKLHPM QAIIKARE | 508 |

SEQ ID NO: 71
Artificial Sequence

| | |
|---|---|
| aagcttaaaa tgagtaagtc taatagtatg aattctacat cacacgaaac cctttttcaa | 60 |
| caattggtct tgggtttgga ccgtatgcca ttgatggatg ttcactggtt gatctacgtt | 120 |
| gctttcggcg catggttatg ttcttatgtg atacatgttt tatcatcttc ctctacagta | 180 |
| aaagtgccag ttgttggata caggtctgta ttcgaaccta catggttgct tagacttaga | 240 |
| ttcgtctggg aaggtggctc tatcataggt caagggtaca ataagtttaa agactctatt | 300 |
| ttccaagtta ggaaattggg aactgatatt gtcattatac cacctaacta tattgatgaa | 360 |
| gtgagaaaat tgtcacagga caagactaga tcagttgaac ctttcattaa tgattttgca | 420 |
| ggtcaataca caagaggcat ggttttcttg caatctgact tacaaaaccg tgttatacaa | 480 |
| caaagactaa ctccaaaatt ggtttccttg accaaggtca tgaaggaaga gttggattat | 540 |
| gctttaacaa aagagatgcc tgatatgaaa aatgacgaat gggtagaagt agatatcagt | 600 |
| agtataatgg tgagattgat ttccaggatc tccgccagag tctttctagg gcctgaacac | 660 |
| tgtcgtaacc aggaatggtt gactactaca gcagaatatt cagaatcact tttcattaca | 720 |
| gggtttatct taagagttgt acctcatatc ttaagaccat tcatcgcccc tctattacct | 780 |
| tcatacagga ctctacttag aaacgtttca agtggtagaa gagtcatcgg tgacatcata | 840 |
| agatctcagc aaggggatgg taacgaagat atactttcct ggatgagaga tgctgccaca | 900 |
| ggagaggaaa agcaaatcga taacattgct cagagaatgt taattctttc tttagcatca | 960 |
| atccacacta ctgcgatgac catgacacat gccatgtacg atctatgtgc ttgccctgag | 1020 |
| tacattgaac cattaagaga tgaagttaaa tctgttgttg gggcttctgg ctgggacaag | 1080 |
| acagcgttaa acagatttca taagttggac tccttcctaa aagagtcaca aagattcaac | 1140 |
| ccagtattct tattgacatt caatagaatc taccatcaat ctatgacctt atcagatggc | 1200 |
| actaacattc catctggaac acgtattgct gttccatcac acgcaatgtt gcaagattct | 1260 |
| gcacatgtcc caggtccaac cccacctact gaatttgatg gattcagata tagtaagata | 1320 |
| cgttctgata gtaactacgc acaaaagtac ctattctcca tgaccgattc ttcaaacatg | 1380 |
| gctttcggat acggcaagta tgcttgtcca ggtagatttt acgcgtctaa tgagatgaaa | 1440 |
| ctaacattag ccattttgtt gctacaattt gagttcaaac taccagatgg taaaggtcgt | 1500 |
| cctagaaata tcactatcga ttctgatatg attccagacc caagagctag actttgcgtc | 1560 |
| agaaaaagat cacttagaga tgaatgaccg cgg | 1593 |

SEQ ID NO: 72
Gibberella fujikuroi

| | |
|---|---|
| MSKSNSMNST SHETLFQQLV LGLDRMPLMD VHWLIYVAFG AWLCSYVIHV LSSSSTVKVP | 60 |
| VVGYRSVFEP TWLLRLRFVW EGGSIIGQGY NKFKDSIFQV RKLGTDIVII PPNYIDEVRK | 120 |
| LSQDKTRSVE PFINDFAGQY TRGMVFLQSD LQNRVIQQRL TPKLVSLTKV MKEELDYALT | 180 |
| KEMPDMKNDE WVEVDISSIM VRLISRISAR VFLGPEHCRN QEWLTTTAEY SESLFITGFI | 240 |
| LRVVPHILRP FIAPLLPSYR TLLRNVSSGR RVIGDIIRSQ QGDGNEDILS WMRDAATGEE | 300 |
| KQIDNIAQRM LILSLASIHT TAMTMTHAMY DLCACPEYIE PLRDEVKSVV GASGWDKTAL | 360 |
| NRFHKLDSFL KESQRFNPVF LLTFNRIYHQ SMTLSDGTNI PSGTRIAVPS HAMLQDSAHV | 420 |
| PGPTPPTEFD GFRYSKIRSD SNYAQKYLFS MTDSSNMAFG YGKYACPGRF YASNEMKLTL | 480 |
| AILLLQFEFK LPDGKGRPRN ITIDSDMIPD PRARLCVRKR SLRDE | 525 |

SEQ ID NO: 73
Artificial Sequence

| | |
|---|---|
| aagcttaaaa tggaagatcc tactgtctta tatgcttgtc ttgccattgc agttgcaact | 60 |
| ttcgttgtta gatggtacag agatccattg agatccatcc caacagttgg tggttccgat | 120 |
| ttgcctattc tatcttacat cggcgcacta agatggacaa gacgtggcag agagatactt | 180 |
| caagagggat atgatggcta cagaggatct acattcaaaa tcgcgatgtt agaccgttgg | 240 |
| atcgtgatcg caaatggtcc taaactagct gatgaagtca gacgtagacc agatgaagag | 300 |
| ttaaacttta tggacggatt aggagcattc gtccaaacta agtacacctt aggtgaagct | 360 |
| attcataacg atccatacca tgtcgatatc ataagagaaa aactaacaag aggccttcca | 420 |
| gccgtgcttc ctgatgtcat tgaagagttg acacttgcgg ttagacagta cattccaaca | 480 |
| gaaggtgatg aatgggtgtc cgtaaactgt tcaaaggccg caagagatat tgttgctaga | 540 |
| gcttctaata gagtctttgt aggtttgcct gcttgcagaa accaaggtta cttagatttg | 600 |
| gcaatagact ttacattgtc tgttgtcaag gatagagcca tcatcaatat gtttccagaa | 660 |
| ttgttgaagc caatagttgg cagagttgta ggtaacgcca ccagaaatgt tcgtagagct | 720 |
| gttccttttg ttgctccatt ggtggaggaa agacgtagac ttatggaaga gtacggtgaa | 780 |
| gactggtctg aaaaacctaa tgatatgtta cagtggataa tggatgaagc tgcatccaga | 840 |
| gatagttcag tgaaggcaat cgcagagaga ttgttaatgg tgaacttcgc ggctattcat | 900 |
| acctcatcaa acactatcac tcatgctttg taccaccttg ccgaaatgcc tgaaactttg | 960 |
| caaccactta gagaagagat cgaaccatta gtcaaagagg agggctggac caaggctgct | 1020 |
| atgggaaaaa tgtggtggtt agattcattt ctaagagaat ctcaaagata caatggcatt | 1080 |
| aacatcgtat ctttaactag aatggctgac aaagatatta cattgagtga tggcacattt | 1140 |
| ttgccaaaag gtactctagt ggccgttcca gcgtattcta ctcatagaga tgatgctgtc | 1200 |
| tacgctgatg ccttagtatt cgatcctttc agattctcac gtatgagagc gagagaaggt | 1260 |
| gaaggtacaa agcaccagtt cgttaatact tcagtcgagt acgttccatt tggtcacgga | 1320 |
| aagcatgctt gtccaggaag attcttcgcc gcaaacgaat tgaaagcaat gttggcttac | 1380 |
| attgttctaa actatgatgt aaagttgcct ggtgacggta aacgtccatt gaacatgtat | 1440 |
| tggggtccaa cagttttgcc tgcaccagca ggccaagtat tgttcagaaa gagacaagtt | 1500 |
| agtctataac cgcgg | 1515 |

SEQ ID NO: 74
Trametes versicolor

| | |
|---|---|
| MEDPTVLYAC LAIAVATFVV RWYRDPLRSI PTVGGSDLPI LSYIGALRWT RRGREILQEG | 60 |
| YDGYRGSTFK IAMLDRWIVI ANGPKLADEV RRRPDEELNF MDGLGAFVQT KYTLGEAIHN | 120 |
| DPYHVDIIRE KLTRGLPAVL PDVIEELTLA VRQYIPTEGD EWVSVNCSKA ARDIVARASN | 180 |
| RVFVGLPACR NQGYLDLAID FTLSVVKDRA IINMFPELLK PIVGRVVGNA TRNVRRAVPF | 240 |
| VAPLVEERRR LMEEYGEDWS EKPNDMLQWI MDEAASRDSS VKAIAERLLM VNFAAIHTSS | 300 |
| NTITHALYHL AEMPETLQPL REEIEPLVKE EGWTKAAMGK MWWLDSFLRE SQRYNGINIV | 360 |
| SLTRMADKDI TLSDGTFLPK GTLVAVPAYS THRDDAVYAD ALVFDPFRFS RMRAREGEGT | 420 |
| KHQFVNTSVE YVPFGHGKHA CPGRFFAANE LKAMLAYIVL NYDVKLPGDG KRPLNMYWGP | 480 |
| TVLPAPAGQV LFRKRQVSL | 499 |

SEQ ID NO: 75
Artificial Sequence

| | |
|---|---|
| atggcatttt tctctatgat ttcaattttg ttgggatttg ttatttcttc tttcatcttc | 60 |
| atctttttct tcaaaaagtt acttagtttt agtaggaaaa acatgtcaga agtttctact | 120 |
| ttgccaagtg ttccagtagt gcctggtttt ccagttattg ggaatttgtt gcaactaaag | 180 |
| gagaaaaagc ctcataaaac tttcactaga tggtcagaga tatatggacc tatctactct | 240 |
| ataaagatgg gttcttcatc tcttattgta ttgaacagta cagaaactgc taaggaagca | 300 |
| atggtcacta gattttcatc aatatctacc agaaaattgt caaacgccct aacagttcta | 360 |
| acctgcgata agtctatggt cgccacttct gattatgatg acttccacaa attagttaag | 420 |
| agatgtttgc taaatggact tcttggtgct aatgctcaaa agagaaaaag acactacaga | 480 |
| gatgctttga ttgaaaatgt gagttccaag ctacatgcac acgctagaga tcatccacaa | 540 |
| gagccagtta actttagagc aattttcgaa cacgaattgt ttggtgtagc attaaagcaa | 600 |
| gccttcggta aagacgtaga atccatatac gtcaaggagt taggcgtaac attatcaaaa | 660 |
| gatgaaatct ttaaggtgct tgtacatgat atgatggagg gtgcaattga tgtagattgg | 720 |
| agagatttct tcccatattt gaaatggatc cctaataagt cttttgaagc taggatacaa | 780 |
| caaaagcaca agagaagact agctgttatg aacgcactta tacaggacag attgaagcaa | 840 |
| aatgggtctg aatcagatga tgattgttac cttaacttct taatgtctga ggctaaaaca | 900 |
| ttgactaagg aacagatcgc aatccttgtc tgggaaacaa tcattgaaac agcagatact | 960 |
| accttagtca caactgaatg ggccatatac gagctagcca aacatccatc tgtgcaagat | 1020 |
| aggttgtgta aggagatcca gaacgtgtgt ggtggagaga aattcaagga agagcagttg | 1080 |
| tcacaagttc cttaccttaa cggcgttttc catgaaacct tgagaaaata ctcacctgca | 1140 |
| ccattagttc ctattagata cgcccacgaa gatacacaaa tcggtggcta ccatgttcca | 1200 |
| gctgggtccg aaattgctat aaacatctac gggtgcaaca tggacaaaaa gagatgggaa | 1260 |
| agaccagaag attggtggcc agaaagattc ttagatgatg gcaaatatga aacatctgat | 1320 |
| ttgcataaaa caatggcttt cggagctggc aaaagagtgt gtgccggtgc tctacaagcc | 1380 |
| tccctaatgg ctggtatcgc tattggtaga ttggtccaag agttcgaatg gaaacttaga | 1440 |
| gatggtgaag aggaaaatgt cgatacttat gggttaacat ctcaaaagtt atacccacta | 1500 |
| atggcaatca tcaatcctag aagatcctaa | 1530 |

SEQ ID NO: 76
Arabidopsis thaliana

| | |
|---|---|
| MAFFSMISIL LGFVISSFIF IFFFKKLLSF SRKNMSEVST LPSVPVVPGF PVIGNLLQLK | 60 |
| EKKPHKTFTR WSEIYGPIYS IKMGSSSLIV LNSTETAKEA MVTRFSSIST RKLSNALTVL | 120 |
| TCDKSMVATS DYDDFHKLVK RCLLNGLLGA NAQKRKRHYR DALIENVSSK LHAHARDHPQ | 180 |
| EPVNFRAIFE HELFGVALKQ AFGKDVESIY VKELGVTLSK DEIFKVLVHD MMEGAIDVDW | 240 |
| RDFFPYLKWI PNKSFEARIQ QKHKRRLAVM NALIQDRLKQ NGSESDDDCY LNFLMSEAKT | 300 |
| LTKEQIAILV WETIIETADT TLVTTEWAIY ELAKHPSVQD RLCKEIQNVC GGEKFKEEQL | 360 |
| SQVPYLNGVF HETLRKYSPA PLVPIRYAHE DTQIGGYHVP AGSEIAINIY GCNMDKKRWE | 420 |
| RPEDWWPERF LDDGKYETSD LHKTMAFGAG KRVCAGALQA SLMAGIAIGR LVQEFEWKLR | 480 |
| DGEEENVDTY GLTSQKLYPL MAIINPRRS | 509 |

SEQ ID NO: 77
Artificial Sequence

| | |
|---|---|
| atgcaatcag attcagtcaa agtctctcca tttgatttgg tttccgctgc tatgaatggc | 60 |
| aaggcaatgg aaaagttgaa cgctagtgaa tctgaagatc caacaacatt gcctgcacta | 120 |
| aagatgctag ttgaaaatag agaattgttg acactgttca caacttcctt cgcagttctt | 180 |
| attgggtgtc ttgtatttct aatgtggaga cgttcatcct ctaaaaagct ggtacaagat | 240 |
| ccagttccac aagttatcgt tgtaaagaag aaagagaagg agtcagaggt tgatgacggg | 300 |
| aaaaagaaag tttctatttt ctacggcaca caaacaggaa ctgccgaagg ttttgctaaa | 360 |
| gcattagtcg aggaagcaaa agtgagatat gaaaagacct ctttcaaggt tatcgatcta | 420 |
| gatgactacg ctgcagatga tgatgaatat gaggaaaaac tgaaaaagga atccttagcc | 480 |
| ttcttcttct tggccacata cggtgatggt gaacctactg ataatgctgc taacttctac | 540 |
| aagtggttca cagaaggcga cgataaaggt gaatggctga aaaagttaca atacggagta | 600 |
| tttggtttag gtaacagaca atatgaacat ttcaacaaga tcgctattgt agttgatgat | 660 |
| aaacttactg aaatgggagc caaaagatta gtaccagtag gattagggga tgatgatcag | 720 |
| tgtatagaag atgacttcac cgcctggaag gaattggtat ggccagaatt ggatcaactt | 780 |
| ttaagggacg aagatgatac ttctgtgact accccataca ctgcagccgt attggagtac | 840 |
| agagtggttt accatgataa accagcagac tcatatgctg aagatcaaac ccatacaaac | 900 |
| ggtcatgttg ttcatgatgc acagcatcct tcaagatcta atgtggcttt caaaaaggaa | 960 |
| ctacacacct ctcaatcaga taggtcttgt actcacttag aattcgatat ttctcacaca | 1020 |
| ggactgtctt acgaaactgg cgatcacgtt ggcgtttatt ccgagaactt gtccgaagtt | 1080 |
| gtcgatgaag cactaaaact gttagggtta tcaccagaca catacttctc agtccatgct | 1140 |
| gataaggagg atgggacacc tatcggtggt gcttcactac caccaccttt tcctccttgc | 1200 |
| acattgagag acgctctaac cagatacgca gatgtcttat cctcacctaa aaaggtagct | 1260 |
| ttgctggcat tggctgctca tgctagtgat cctagtgaag ccgataggtt aaagttcctg | 1320 |
| gcttcaccag ccggaaaaga tgaatatgca caatggatcg tcgccaacca acgttctttg | 1380 |
| ctagaagtga tgcaaagttt tccatctgcc aagcctccat taggtgtgtt cttcgcagca | 1440 |
| gtagctccac gtttacaacc aagatactac tctatcagtt catctcctaa gatgtctcct | 1500 |
| aacagaatac atgttacatg tgctttggtg tacgagacta ctccagcagg cagaattcac | 1560 |
| agaggattgt gttcaacctg gatgaaaaat gctgtccctt taacagagtc acctgattgc | 1620 |
| tctcaagcat ccattttcgt tagaacatca aatttcagac ttccagtgga tccaaaagtt | 1680 |
| ccagtcatta tgataggacc aggcactggt cttgccccat tcaggggctt tcttcaagag | 1740 |
| agattggcct tgaaggaatc tggtacagaa ttgggttctt ctatcttttt ctttggttgc | 1800 |
| cgtaatagaa aagttgactt tatctacgag gacgagctta acaattttgt tgagacagga | 1860 |
| gcattgtcag aattgatcgt cgcattttca agagaaggga ctgccaaaga gtacgttcag | 1920 |
| cacaagatga gtcaaaaagc ctccgatata tggaaacttc taagtgaagg tgcctatctt | 1980 |
| tatgtctgtg gcgatgcaaa gggcatggcc aaggatgtcc atagaactct gcatacaatt | 2040 |
| gttcaggaac aagggagtct ggattcttcc aaggctgaat tgtacgtcaa aaacttacag | 2100 |
| atgtctggaa gatacttaag agatgtttgg taa | 2133 |

SEQ ID NO: 78
Stevia rebaudiana

| | |
|---|---|
| MQSDSVKVSP FDLVSAAMNG KAMEKLNASE SEDPTTLPAL KMLVENRELL TLFTTSFAVL | 60 |
| IGCLVFLMWR RSSSKKLVQD PVPQVIVVKK KEKESEVDDG KKKVSIFYGT QTGTAEGFAK | 120 |
| ALVEEAKVRY EKTSFKVIDL DDYAADDDEY EEKLKKESLA FFFLATYGDG EPTDNAANFY | 180 |
| KWFTEGDDKG EWLKKLQYGV FGLGNRQYEH FNKIAIVVDD KLTEMGAKRL VPVGLGDDDQ | 240 |
| CIEDDFTAWK ELVWPELDQL LRDEDDTSVT TPYTAAVLEY RVVYHDKPAD SYAEDQTHTN | 300 |
| GHVVHDAQHP SRSNVAFKKE LHTSQSDRSC THLEFDISHT GLSYETGDHV GVYSENLSEV | 360 |
| VDEALKLLGL SPDTYFSVHA DKEDGTPIGG ASLPPPFPPC TLRDALTRYA DVLSSPKKVA | 420 |
| LLALAAHASD PSEADRLKFL ASPAGKDEYA QWIVANQRSL LEVMQSFPSA KPPLGVFFAA | 480 |
| VAPRLQPRYY SISSSPKMSP NRIHVTCALV YETTPAGRIH RGLCSTWMKN AVPLTESPDC | 540 |
| SQASIFVRTS NFRLPVDPKV PVIMIGPGTG LAPFRGFLQE RLALKESGTE LGSSIFFFGC | 600 |
| RNRKVDFIYE DELNNFVETG ALSELIVAFS REGTAKEYVQ HKMSQKASDI WKLLSEGAYL | 660 |
| YVCGDAKGMA KDVHRTLHTI VQEQGSLDSS KAELYVKNLQ MSGRYLRDVW | 710 |

SEQ ID NO: 79
Siraitia grosvenorii

| | |
|---|---|
| atgaaggtca gtccattcga attcatgtcc gctattatca agggtagaat ggacccatct | 60 |
| aactcctcat ttgaatctac tggtgaagtt gcctccgtta tctttgaaaa cagagaattg | 120 |
| gttgccatct tgaccacttc tattgctgtt atgattggtt gcttcgttgt cttgatgtgg | 180 |
| agaagagctg gttctagaaa ggttaagaat gtcgaattgc caaagccatt gattgtccat | 240 |
| gaaccagaac ctgaagttga agatggtaag aagaaggttt ccatcttctt cggtactcaa | 300 |
| actggtactg ctgaaggttt tgctaaggct ttggctgatg aagctaaagc tagatacgaa | 360 |
| aaggctacct tcagagttgt tgatttggat gattatgctg ccgatgatga ccaatacgaa | 420 |
| gaaaaattga agaacgaatc cttcgccgtt ttcttgttgg ctacttatgg tgatggtgaa | 480 |
| cctactgata atgctgctag attttacaag tggttcgccg aaggtaaaga aagaggtgaa | 540 |
| tggttgcaaa acttgcacta tgctgttttt ggtttgggta acagacaata cgaacacttc | 600 |
| aacaagattg ctaaggttgc cgacgaatta ttggaagctc aaggtggtaa tagattggtt | 660 |
| aaggttggtt taggtgatga cgatcaatgc atcgaagatg atttttctgc ttggagagaa | 720 |
| tctttgtggc cagaattgga tatgttgttg agagatgaag atgatgctac tactgttact | 780 |
| actccatata ctgctgctgt cttggaatac agagttgtct ttcatgattc tgctgatgtt | 840 |
| gctgctgaag ataagtcttg gattaacgct aatggtcatg ctgttcatga tgctcaacat | 900 |
| ccattcagat ctaacgttgt cgtcagaaaa gaattgcata cttctgcctc tgatagatcc | 960 |
| tgttctcatt tggaattcaa catttccggt tccgctttga attacgaaac tggtgatcat | 1020 |
| gttggtgtct actgtgaaaa cttgactgaa actgttgatg aagccttgaa cttgttgggt | 1080 |
| ttgtctccag aaacttactt ctctatctac accgataacg aagatggtac tccattgggt | 1140 |
| ggttcttcat tgccaccacc atttccatca tgtactttga gaactgcttt gaccagatac | 1200 |
| gctgatttgt tgaactctcc aaaaaagtct gctttgttgg ctttagctgc tcatgcttct | 1260 |
| aatccagttg aagctgatag attgagatac ttggcttctc cagctggtaa agatgaatat | 1320 |
| gcccaatctg ttatcggttc ccaaaagtct ttgttggaag ttatggctga attcccatct | 1380 |
| gctaaaccac cattaggtgt tttttttgct gctgttgctc caagattgca acctagattc | 1440 |
| tactccattt catcctctcc aagaatggct ccatctagaa tccatgttac ttgtgctttg | 1500 |
| gtttacgata agatgccaac tggtagaatt cataagggtg tttgttctac ctggatgaag | 1560 |
| aattctgttc caatggaaaa gtcccatgaa tgttcttggg ctccaatttt cgttagacaa | 1620 |
| tccaatttta agttgccagc cgaatccaag gttccaatta tcatggttgg tccaggtact | 1680 |
| ggtttggctc cttttagagg ttttttacaa gaaagattgg ccttgaaaga atccggtgtt | 1740 |
| gaattgggtc catccatttt gtttttcggt tgcagaaaca gaagaatgga ttacatctac | 1800 |
| gaagatgaat tgaacaactt cgttgaaacc ggtgctttgt ccgaattggt tattgctttt | 1860 |
| tctagagaag gtcctaccaa agaatacgtc caacataaga tggctgaaaa ggcttctgat | 1920 |
| atctggaact tgatttctga aggtgcttac ttgtacgttt gtggtgatgc taaaggtatg | 1980 |
| gctaaggatg ttcatagaac cttgcatacc atcatgcaag aacaaggttc tttggattct | 2040 |
| tccaaagctg aatccatggt caagaacttg caaatgaatg gtagatactt aagagatgtt | 2100 |
| tggtaa | 2106 |

SEQ ID NO: 80
Siraitia grosvenorii

| | |
|---|---|
| MKVSPFEFMS AIIKGRMDPS NSSFESTGEV ASVIFENREL VAILTTSIAV MIGCFVVLMW | 60 |
| RRAGSRKVKN VELPKPLIVH EPEPEVEDGK KKVSIFFGTQ TGTAEGFAKA LADEAKARYE | 120 |
| KATFRVVDLD DYAADDDQYE EKLKNESFAV FLLATYGDGE PTDNAARFYK WFAEGKERGE | 180 |
| WLQNLHYAVF GLGNRQYEHF NKIAKVADEL LEAQGGNRLV KVGLGDDDQC IEDDFSAWRE | 240 |
| SLWPELDMLL RDEDDATTVT TPYTAAVLEY RVVFHDSADV AAEDKSWINA NGHAVHDAQH | 300 |
| PFRSNVVVRK ELHTSASDRS CSHLEFNISG SALNYETGDH VGVYCENLTE TVDEALNLLG | 360 |
| LSPETYFSIY TDNEDGTPLG GSSLPPPFPS CTLRTALTRY ADLLNSPKKS ALLALAAHAS | 420 |
| NPVEADRLRY LASPAGKDEY AQSVIGSQKS LLEVMAEFPS AKPPLGVFFA AVAPRLQPRF | 480 |
| YSISSSPRMA PSRIHVTCAL VYDKMPTGRI HKGVCSTWMK NSVPMEKSHE CSWAPIFVRQ | 540 |
| SNFKLPAESK VPIIMVGPGT GLAPFRGFLQ ERLALKESGV ELGPSILFFG CRNRRMDYIY | 600 |
| EDELNNFVET GALSELVIAF SREGPTKEYV QHKMAEKASD IWNLISEGAY LYVCGDAKGM | 660 |
| AKDVHRTLHT IMQEQGSLDS SKAESMVKNL QMNGRYLRDV W | 701 |

SEQ ID NO: 81
Artificial Sequence

| | |
|---|---|
| atggcagaat tagatacact tgatatagta gtattaggtg ttatcttttt gggtactgtg | 60 |
| gcatacttta ctaagggtaa attgtggggt gttaccaagg atccatacgc taacggattc | 120 |
| gctgcaggtg gtgcttccaa gcctggcaga actagaaaca tcgtcgaagc tatggaggaa | 180 |
| tcaggtaaaa actgtgttgt tttctacggc agtcaaacag gtacagcgga ggattacgca | 240 |
| tcaagacttg caaaggaagg aaagtccaga ttcggtttga acactatgat cgccgatcta | 300 |
| gaagattatg acttcgataa cttagacact gttccatctg ataacatcgt tatgtttgta | 360 |
| ttggctactt acggtgaagg cgaaccaaca gataacgccg tggatttcta tgagttcatt | 420 |
| actggcgaag atgcctcttt caatgagggc aacgatcctc cactaggtaa cttgaattac | 480 |
| gttgcgttcg gtctgggcaa caatacctac gaacactaca actcaatggt caggaacgtt | 540 |
| aacaaggctc tagaaaagtt aggagctcat agaattggag aagcaggtga gggtgacgac | 600 |
| ggagctggaa ctatggaaga ggacttttta gcttggaaag atccaatgtg ggaagccttg | 660 |
| gctaaaaaga tgggcttgga ggaaagagaa gctgtatatg aacctatttt cgctatcaat | 720 |
| gagagagatg atttgacccc tgaagcgaat gaggtatact tgggagaacc taataagcta | 780 |
| cacttggaag gtacagcgaa aggtccattc aactcccaca acccatatat cgcaccaatt | 840 |
| gcagaatcat acgaactttt ctcagctaag gatagaaatt gtctgcatat ggaaattgat | 900 |
| atttctggta gtaatctaaa gtatgaaaca ggcgaccata tcgcgatctg gcctaccaac | 960 |
| ccaggtgaag aggtcaacaa atttcttgac attctagatc tgtctggtaa gcaacattcc | 1020 |
| gtcgtaacag tgaaagcctt agaacctaca gccaaagttc cttttccaaa tccaactacc | 1080 |
| tacgatgcta tattgagata ccatctggaa atatgcgctc cagtttctag acagtttgtc | 1140 |
| tcaactttag cagcattcgc ccctaatgat gatatcaaag ctgagatgaa ccgtttggga | 1200 |
| tcagacaaag attacttcca cgaaaagaca ggaccacatt actacaatat cgctagattt | 1260 |
| ttggcctcag tctctaaagg tgaaaaatgg acaaagatac cattttctgc tttcatagaa | 1320 |
| ggccttacaa aactacaacc aagatactat tctatctctt cctctagttt agttcagcct | 1380 |
| aaaaagatta gtattactgc tgttgtcgaa tctcagcaaa ttccaggtag agatgaccca | 1440 |
| ttcagaggtg tagcgactaa ctacttgttc gctttgaagc agaaacaaaa cggtgatcca | 1500 |
| aatccagctc cttttggcca atcatacgag ttgacaggac caaggaataa gtatgatggt | 1560 |
| atacatgttc cagtccatgt aagacattct aactttaagc taccatctga tccaggcaaa | 1620 |
| cctattatca tgatcggtcc aggtaccggt gttgcccctt ttagaggctt cgtccaagag | 1680 |
| agggcaaaac aagccagaga tggtgtagaa gttggtaaaa cactgctgtt ctttggatgt | 1740 |
| agaaagagta cagaagattt catgtatcaa aaagagtggc aagagtacaa ggaagctctt | 1800 |
| ggcgacaaat tcgaaatgat tacagctttt tcaagagaag gatctaaaaa ggtttatgtt | 1860 |
| caacacagac tgaaggaaag atcaaaggaa gtttctgatc ttctatccca aaaagcatac | 1920 |
| ttctacgttt gcggagacgc cgcacatatg gcacgtgaag tgaacactgt gttagcacag | 1980 |
| atcatagcag aaggccgtgg tgtatcagaa gccaagggtg aggaaattgt caaaaacatg | 2040 |
| agatcagcaa atcaatacca agtgtgttct gatttcgtaa ctttacactg taaagagaca | 2100 |
| acatacgcga attcagaatt gcaagaggat gtctggagtt aa | 2142 |

SEQ ID NO: 82
Gibberella fujikuroi

| | |
|---|---|
| MAELDTLDIV VLGVIFLGTV AYFTKGKLWG VTKDPYANGF AAGGASKPGR TRNIVEAMEE | 60 |
| SGKNCVVFYG SQTGTAEDYA SRLAKEGKSR FGLNTMIADL EDYDFDNLDT VPSDNIVMFV | 120 |
| LATYGEGEPT DNAVDFYEFI TGEDASFNEG NDPPLGNLNY VAFGLGNNTY EHYNSMVRNV | 180 |
| NKALEKLGAH RIGEAGEGDD GAGTMEEDFL AWKDPMWEAL AKKMGLEERE AVYEPIFAIN | 240 |
| ERDDLTPEAN EVYLGEPNKL HLEGTAKGPF NSHNPYIAPI AESYELFSAK DRNCLHMEID | 300 |
| ISGSNLKYET GDHIAIWPTN PGEEVNKFLD ILDLSGKQHS VVTVKALEPT AKVPFPNPTT | 360 |
| YDAILRYHLE ICAPVSRQFV STLAAFAPND DIKAEMNRLG SDKDYFHEKT GPHYYNIARF | 420 |
| LASVSKGEKW TKIPFSAFIE GLTKLQPRYY SISSSSLVQP KKISITAVVE SQQIPGRDDP | 480 |
| FRGVATNYLF ALKQKQNGDP NPAPFGQSYE LTGPRNKYDG IHVPVHVRHS NFKLPSDPGK | 540 |
| PIIMIGPGTG VAPFRGFVQE RAKQARDGVE VGKTLLFFGC RKSTEDFMYQ KEWQEYKEAL | 600 |
| GDKFEMITAF SREGSKKVYV QHRLKERSKE VSDLLSQKAY FYVCGDAAHM AREVNTVLAQ | 660 |
| IIAEGRGVSE AKGEEIVKNM RSANQYQVCS DFVTLHCKET TYANSELQED VWS | 713 |

SEQ ID NO: 83
Stevia rebaudiana

| | |
|---|---|
| atgcaatcgg aatccgttga agcatcgacg attgatttga tgactgctgt tttgaaggac | 60 |
| acagtgatcg atacagcgaa cgcatctgat aacggagact caaagatgcc gccggcgttg | 120 |
| gcgatgatgt tcgaaattcg tgatctgttg ctgattttga ctacgtcagt tgctgttttg | 180 |
| gtcggatgtt tcgttgtttt ggtgtggaag agatcgtccg ggaagaagtc cggcaaggaa | 240 |
| ttggagccgc cgaagatcgt tgtgccgaag aggcggctgg agcaggaggt tgatgatggt | 300 |
| aagaagaagg ttacgatttt cttcggaaca caaactggaa cggctgaagg tttcgctaag | 360 |
| gcacttttcg aagaagcgaa agcgcgatat gaaaaggcag cgtttaaagt gattgatttg | 420 |
| gatgattatg ctgctgattt ggatgagtat gcagagaagc tgaagaagga aacatatgct | 480 |
| ttcttcttct tggctacata tggagatggt gagccaactg ataatgctgc caaattttat | 540 |
| aaatggttta ctgagggaga cgagaaaggc gtttggcttc aaaaacttca atatggagta | 600 |
| tttggtcttg gcaacagaca atatgaacat ttcaacaaga ttggaatagt ggttgatgat | 660 |
| ggtctcaccg agcagggtgc aaaacgcatt gttcccgttg gtcttggaga cgacgatcaa | 720 |
| tcaattgaag acgatttttc ggcatggaaa gagttagtgt ggcccgaatt ggatctattg | 780 |
| cttcgcgatg aagatgacaa agctgctgca actccttaca cagctgcaat ccctgaatac | 840 |
| cgcgtcgtat ttcatgacaa acccgatgcg ttttctgatg atcatactca aaccaatggt | 900 |
| catgctgttc atgatgctca acatccatgc agatccaatg tggctgttaa aaaagagctt | 960 |
| catactcctg aatccgatcg ttcatgcaca catcttgaat ttgacatttc tcacactgga | 1020 |
| ttatcttatg aaactgggga tcatgttggt gtatactgtg aaaacctaat tgaagtagtg | 1080 |
| gaagaagctg ggaaattgtt aggattatca acagatactt atttctcgtt acatattgat | 1140 |
| aacgaagatg gttcaccact tggtggacct tcattacaac ctccttttcc tccttgtact | 1200 |
| ttaagaaaag cattgactaa ttatgcagat ctgttaagct ctcccaaaaa gtcaactttg | 1260 |
| cttgctctag ctgctcatgc ttccgatccc actgaagctg atcgtttaag atttcttgca | 1320 |
| tctcgcgagg gcaaggatga atatgctgaa tgggttgttg caaaccaaag aagtcttctt | 1380 |
| gaagtcatgg aagctttccc gtcagctaga ccgccacttg gtgttttctt tgcagcggtt | 1440 |
| gcaccgcgtt tacagcctcg ttactactct atttcttcct ccccaaagat ggaaccaaac | 1500 |
| aggattcatg ttacttgcgc gttggtttat gaaaaaactc ccgcaggtcg tatccacaaa | 1560 |
| ggaatctgct caacctggat gaagaacgct gtacctttga ccgaaagtca agattgcagt | 1620 |
| tgggcaccga tttttgttag aacatcaaac ttcagacttc caattgaccc gaaagtcccg | 1680 |
| gttatcatga ttggtcctgg aaccgggttg gctccattta ggggttttct tcaagaaaga | 1740 |
| ttggctctta aagaatccgg aaccgaactc gggtcatcta ttttattctt cggttgtaga | 1800 |
| aaccgcaaag tggattacat atatgagaat gaactcaaca actttgttga aaatggtgcg | 1860 |
| ctttctgagc ttgatgttgc tttctcccgc gatggcccga cgaaagaata cgtgcaacat | 1920 |
| aaaatgaccc aaaaggcttc tgaaatatgg aatatgcttt ctgagggagc atatttatat | 1980 |
| gtatgtggtg atgctaaagg catggctaaa gatgtacacc gtacacttca caccattgtg | 2040 |
| caagaacagg gaagtttgga ctcgtctaaa gcggagttgt atgtgaagaa tctacaaatg | 2100 |
| tcaggaagat acctccgtga tgtttggtaa | 2130 |

SEQ ID NO: 84
Stevia rebaudiana

| | |
|---|---|
| MQSESVEAST IDLMTAVLKD TVIDTANASD NGDSKMPPAL AMMFEIRDLL LILTTSVAVL | 60 |
| VGCFVVLVWK RSSGKKSGKE LEPPKIVVPK RRLEQEVDDG KKKVTIFFGT QTGTAEGFAK | 120 |
| ALFEEAKARY EKAAFKVIDL DDYAADLDEY AEKLKKETYA FFFLATYGDG EPTDNAAKFY | 180 |
| KWFTEGDEKG VWLQKLQYGV FGLGNRQYEH FNKIGIVVDD GLTEQGAKRI VPVGLGDDDQ | 240 |
| SIEDDFSAWK ELVWPELDLL LRDEDDKAAA TPYTAAIPEY RVVFHDKPDA FSDDHTQTNG | 300 |
| HAVHDAQHPC RSNVAVKKEL HTPESDRSCT HLEFDISHTG LSYETGDHVG VYCENLIEVV | 360 |
| EEAGKLLGLS TDTYFSLHID NEDGSPLGGP SLQPPFPPCT LRKALTNYAD LLSSPKKSTL | 420 |
| LALAAHASDP TEADRLRFLA SREGKDEYAE WVVANQRSLL EVMEAFPSAR PPLGVFFAAV | 480 |
| APRLQPRYYS ISSSPKMEPN RIHVTCALVY EKTPAGRIHK GICSTWMKNA VPLTESQDCS | 540 |
| WAPIFVRTSN FRLPIDPKVP VIMIGPGTGL APFRGFLQER LALKESGTEL GSSILFFGCR | 600 |
| NRKVDYIYEN ELNNFVENGA LSELDVAFSR DGPTKEYVQH KMTQKASEIW NMLSEGAYLY | 660 |
| VCGDAKGMAK DVHRTLHTIV QEQGSLDSSK AELYVKNLQM SGRYLRDVW | 709 |

SEQ ID NO: 85
Artificial Sequence

| | |
|---|---|
| atgcaatcta actccgtgaa gatttcgccg cttgatctgg taactgcgct gtttagcggc | 60 |
| aaggttttgg acacatcgaa cgcatcggaa tcgggagaat ctgctatgct gccgactata | 120 |
| gcgatgatta tggagaatcg tgagctgttg atgatactca caacgtcggt tgctgtattg | 180 |
| atcggatgcg ttgtcgtttt ggtgtggcgg agatcgtcta cgaagaagtc ggcgttggag | 240 |
| ccaccggtga ttgtggttcc gaagagagtg caagaggagg aagttgatga tggtaagaag | 300 |
| aaagttacgg ttttcttcgg cacccaaact ggaacagctg aaggcttcgc taaggcactt | 360 |
| gttgaggaag ctaaagctcg atatgaaaag gctgtcttta aagtaattga tttggatgat | 420 |
| tatgctgctg atgacgatga gtatgaggag aaactaaaga aagaatcttt ggcctttttc | 480 |
| tttttggcta cgtatggaga tggtgagcca acagataatg ctgccagatt ttataaatgg | 540 |
| tttactgagg gagatgcgaa aggagaatgg cttaataagc ttcaatatgg agtatttggt | 600 |
| ttgggtaaca gacaatatga acattttaac aagatcgcaa aagtggttga tgatggtctt | 660 |
| gtagaacagg gtgcaaagcg tcttgttcct gttggacttg gagatgatga tcaatgtatt | 720 |
| gaagatgact tcaccgcatg gaaagagtta gtatggccgg agttggatca attacttcgt | 780 |
| gatgaggatg acacaactgt tgctactcca tacacagctg ctgttgcaga atatcgcgtt | 840 |
| gtttttcatg aaaaaccaga cgcgctttct gaagattata gttatacaaa tggccatgct | 900 |
| gttcatgatg ctcaacatcc atgcagatcc aacgtggctg tcaaaaagga acttcatagt | 960 |
| cctgaatctg accggtcttg cactcatctt gaatttgaca tctcgaacac cggactatca | 1020 |
| tatgaaactg gggaccatgt tggagtttac tgtgaaaact tgagtgaagt tgtgaatgat | 1080 |
| gctgaaagat tagtaggatt accaccagac acttactcct ccatccacac tgatagtgaa | 1140 |
| gacgggtcgc cacttggcgg agcctcattg ccgcctcctt tcccgccatg cactttaagg | 1200 |
| aaagcattga cgtgttatgc tgatgttttg agttctccca agaagtcggc tttgcttgca | 1260 |
| ctagctgctc atgccaccga tcccagtgaa gctgatagat tgaaatttct tgcatccccc | 1320 |
| gccggaaagg atgaatattc tcaatggata gttgcaagcc aaagaagtct ccttgaagtc | 1380 |
| atggaagcat tcccgtcagc taagccttca cttggtgttt tctttgcatc tgttgccccg | 1440 |
| cgcttacaac caagatacta ctctatttct tcctcaccca agatggcacc ggataggatt | 1500 |
| catgttacat gtgcattagt ctatgagaaa acacctgcag gccgcatcca caaaggagtt | 1560 |
| tgttcaactt ggatgaagaa cgcagtgcct atgaccgaga gtcaagattg cagttgggcc | 1620 |
| ccaatatacg tccgaacatc caatttcaga ctaccatctg accctaaggt cccggttatc | 1680 |
| atgattggac ctggcactgg tttggctcct tttagaggtt tccttcaaga gcggttagct | 1740 |
| ttaaaggaag ccggaactga cctcggttta tccattttat tcttcggatg taggaatcgc | 1800 |
| aaagtggatt tcatatatga aaacgagctt aacaactttg tggagactgg tgctctttct | 1860 |
| gagcttattg ttgctttctc ccgtgaaggc ccgactaagg aatatgtgca acacaagatg | 1920 |
| agtgagaagg cttcggatat ctggaacttg ctttctgaag gagcatattt atacgtatgt | 1980 |
| ggtgatgcca aaggcatggc caaagatgta catcgaaccc tccacacaat tgtgcaagaa | 2040 |
| cagggatctc ttgactcgtc aaaggcagaa ctctacgtga agaatctaca aatgtcagga | 2100 |
| agatacctcc gtgacgtttg gtaa | 2124 |

SEQ ID NO: 86
Stevia rebaudiana

| | |
|---|---|
| MQSNSVKISP LDLVTALFSG KVLDTSNASE SGESAMLPTI AMIMENRELL MILTTSVAVL | 60 |
| IGCVVVLVWR RSSTKKSALE PPVIVVPKRV QEEEVDDGKK KVTVFFGTQT GTAEGFAKAL | 120 |
| VEEAKARYEK AVFKVIDLDD YAADDDEYEE KLKKESLAFF FLATYGDGEP TDNAARFYKW | 180 |
| FTEGDAKGEW LNKLQYGVFG LGNRQYEHFN KIAKVVDDGL VEQGAKRLVP VGLGDDDQCI | 240 |
| EDDFTAWKEL VWPELDQLLR DEDDTTVATP YTAAVAEYRV VFHEKPDALS EDYSYTNGHA | 300 |
| VHDAQHPCRS NVAVKKELHS PESDRSCTHL EFDISNTGLS YETGDHVGVY CENLSEVVND | 360 |
| AERLVGLPPD TYSSIHTDSE DGSPLGGASL PPPFPPCTLR KALTCYADVL SSPKKSALLA | 420 |
| LAAHATDPSE ADRLKFLASP AGKDEYSQWI VASQRSLLEV MEAFPSAKPS LGVFFASVAP | 480 |
| RLQPRYYSIS SSPKMAPDRI HVTCALVYEK TPAGRIHKGV CSTWMKNAVP MTESQDCSWA | 540 |
| PIYVRTSNFR LPSDPKVPVI MIGPGTGLAP FRGFLQERLA LKEAGTDLGL SILFFGCRNR | 600 |
| KVDFIYENEL NNFVETGALS ELIVAFSREG PTKEYVQHKM SEKASDIWNL LSEGAYLYVC | 660 |
| GDAKGMAKDV HRTLHTIVQE QGSLDSSKAE LYVKNLQMSG RYLRDVW | 707 |

SEQ ID NO: 87
Artificial Sequence

| | |
|---|---|
| atgtcctcca actccgattt ggtcagaaga ttggaatctg ttttgggtgt ttctttcggt | 60 |
| ggttctgtta ctgattccgt tgttgttatt gctaccacct ctattgcttt ggttatcggt | 120 |
| gttttggttt tgttgtggag aagatcctct gacagatcta gagaagttaa gcaattggct | 180 |
| gttccaaagc cagttactat cgttgaagaa gaagatgaat tcgaagttgc ttctggtaag | 240 |
| accagagttt ctattttcta cggtactcaa actggtactg ctgaaggttt tgctaaggct | 300 |
| ttggctgaag aaatcaaagc cagatacgaa aaagctgccg ttaaggttat tgatttggat | 360 |
| gattacacag ccgaagatga caaatacggt gaaaagttga agaaagaaac tatggccttc | 420 |
| ttcatgttgg ctacttatgg tgatggtgaa cctactgata atgctgctag attttacaag | 480 |
| tggttcaccg aaggtactga tagaggtgtt tggttggaac atttgagata cggtgtattc | 540 |
| ggtttgggta acagacaata cgaacacttc aacaagattg ccaaggttgt tgatgatttg | 600 |
| ttggttgaac aaggtgccaa gagattggtt actgttggtt tgggtgatga tgatcaatgc | 660 |
| atcgaagatg atttctccgc ttggaaagaa gccttgtggc cagaattgga tcaattattg | 720 |
| caagatgata ccaacaccgt ttctactcca tacactgctg ttattccaga atacagagtt | 780 |
| gttatccacg atccatctgt tacctcttat gaagatccat actctaacat ggctaacggt | 840 |
| aatgcctctt acgatattca tcatccatgt agagctaacg ttgccgtcca aaaagaattg | 900 |
| cataagccag aatctgacag aagttgcatc catttggaat tcgatatttt cgctactggt | 960 |
| ttgacttacg aaaccggtga tcatgttggt gtttacgctg ataattgtga tgatactgta | 1020 |
| gaagaagccg ctaagttgtt gggtcaacca ttggatttgt tgttctccat tcataccgat | 1080 |
| aacaacgacg gtacttcttt gggttcttct ttgccaccac catttccagg tccatgtact | 1140 |
| ttgagaactg ctttggctag atatgccgat ttgttgaatc caccaaaaaa ggctgctttg | 1200 |
| attgctttag ctgctcatgc tgatgaacca tctgaagctg aaagattgaa gttcttgtca | 1260 |
| tctccacaag gtaaggacga atattctaaa tgggttgtcg gttcccaaag atccttggtt | 1320 |
| gaagttatgg ctgaatttcc atctgctaaa ccaccattgg gtgtattttt tgctgctgtt | 1380 |
| gttcctagat tgcaacctag atattactcc atctcttcca gtccaagatt tgctccacat | 1440 |
| agagttcatg ttacttgcgc tttggtttat ggtccaactc caactggtag aattcacaga | 1500 |
| ggtgtatgtt cattctggat gaagaatgtt gtcccattgg aaaagtctca aaactgttct | 1560 |
| tgggccccaa ttttcatcag acaatctaat ttcaagttgc cagccgatca ttctgttcca | 1620 |
| atagttatgg ttggtccagg tactggttta gctcctttta gaggtttctt acaagaaaga | 1680 |
| ttggccttga aagaagaagg tgctcaagtt ggtcctgctt tgttgttttt tggttgcaga | 1740 |
| aacagacaaa tggacttcat ctacgaagtc gaattgaaca actttgtcga acaaggtgct | 1800 |
| ttgtccgaat tgatcgttgc tttttcaaga gaaggtccat ccaaagaata cgtccaacat | 1860 |
| aagatggttg aaaaggcagc ttacatgtgg aacttgattt ctcaaggtgg ttacttctac | 1920 |
| gtttgtggtg atgctaaagg tatggctaga gatgttcata gaacattgca taccatcgtc | 1980 |
| caacaagaag aaaaggttga ttctaccaag gccgaatcca tcgttaagaa attgcaaatg | 2040 |
| gacggtagat acttgagaga tgtttggtga | 2070 |

SEQ ID NO: 88
Rubus suavissimus

| | |
|---|---|
| MSSNSDLVRR LESVLGVSFG GSVTDSVVVI ATTSIALVIG VLVLLWRRSS DRSREVKQLA | 60 |
| VPKPVTIVEE EDEFEVASGK TRVSIFYGTQ TGTAEGFAKA LAEEIKARYE KAAVKVIDLD | 120 |
| DYTAEDDKYG EKLKKETMAF FMLATYGDGE PTDNAARFYK WFTEGTDRGV WLEHLRYGVF | 180 |
| GLGNRQYEHF NKIAKVVDDL LVEQGAKRLV TVGLGDDDQC IEDDFSAWKE ALWPELDQLL | 240 |
| QDDTNTVSTP YTAVIPEYRV VIHDPSVTSY EDPYSNMANG NASYDIHHPC RANVAVQKEL | 300 |
| HKPESDRSCI HLEFDIFATG LTYETGDHVG VYADNCDDTV EEAAKLLGQP LDLLFSIHTD | 360 |
| NNDGTSLGSS LPPPFPGPCT LRTALARYAD LLNPPKKAAL IALAAHADEP SEAERLKFLS | 420 |
| SPQGKDEYSK WVVGSQRSLV EVMAEFPSAK PPLGVFFAAV VPRLQPRYYS ISSSPRFAPH | 480 |
| RVHVTCALVY GPTPTGRIHR GVCSFWMKNV VPLEKSQNCS WAPIFIRQSN FKLPADHSVP | 540 |
| IVMVGPGTGL APFRGFLQER LALKEEGAQV GPALLFFGCR NRQMDFIYEV ELNNFVEQGA | 600 |
| LSELIVAFSR EGPSKEYVQH KMVEKAAYMW NLISQGGYFY VCGDAKGMAR DVHRTLHTIV | 660 |
| QQEEKVDSTK AESIVKKLQM DGRYLRDVW | 689 |

SEQ ID NO: 89
Artificial Sequence

| | |
|---|---|
| atgacttctg cactttatgc ctccgatctt ttcaaacaat tgaaaagtat catgggaacg | 60 |
| gattctttgt ccgatgatgt tgtattagtt attgctacaa cttctctggc actggttgct | 120 |
| ggtttcgttg tcttattgtg gaaaaagacc acggcagatc gttccggcga gctaaagcca | 180 |
| ctaatgatcc ctaagtctct gatggcgaaa gatgaggatg atgacttaga tctaggttct | 240 |
| ggaaaaacga gagtctctat cttcttcggc acacaaaccg gaacagccga aggattcgct | 300 |
| aaagcacttt cagaagagat caaagcaaga tacgaaaagg cggctgtaaa agtaatcgat | 360 |
| ttggatgatt acgctgccga tgatgaccaa tatgaggaaa agttgaaaaa ggaaacattg | 420 |
| gctttctttt gtgtagccac gtatggtgat ggtgaaccaa ccgataacgc cgcaagattc | 480 |
| tacaagtggt ttactgaaga gaacgaaaga gatatcaagt tgcagcaact tgcttacggc | 540 |
| gtttttgcct taggtaacag acaatacgag cactttaaca agataggtat tgtcttagat | 600 |
| gaagagttat gcaaaaaggg tgcgaagaga ttgattgaag tcggtttagg agatgatgat | 660 |
| caatctatcg aggatgactt taatgcatgg aaggaatctt tgtggtctga attagataag | 720 |
| ttacttaagg acgaagatga taaatccgtt gccactccat acacagccgt cattccagaa | 780 |
| tatagagtag ttactcatga tccaagattc acaacacaga aatcaatgga aagtaatgtg | 840 |
| gctaatggta atactaccat cgatattcat catccatgta gagtagacgt tgcagttcaa | 900 |
| aaggaattgc acactcatga atcagacaga tcttgcatac atcttgaatt tgatatatca | 960 |
| cgtactggta tcacttacga aacaggtgat cacgtgggtg tctacgctga aaaccatgtt | 1020 |
| gaaattgtag aggaagctgg aaagttgttg ggccatagtt tagatcttgt tttctcaatt | 1080 |
| catgccgata aagaggatgg ctcaccacta gaaagtgcag tgcctccacc atttccagga | 1140 |
| ccatgcaccc taggtaccgg tttagctcgt tacgcggatc tgttaaatcc tccacgtaaa | 1200 |
| tcagctctag tggccttggc tgcgtacgcc acagaacctt ctgaggcaga aaaactgaaa | 1260 |
| catctaactt caccagatgg taaggatgaa tactcacaat ggatagtagc tagtcaacgt | 1320 |
| tctttactag aagttatggc tgctttccca tccgctaaac ctcctttggg tgttttcttc | 1380 |
| gccgcaatag cgcctagact gcaaccaaga tactattcaa tttcatcctc acctagactg | 1440 |
| gcaccatcaa gagttcatgt cacatccgct ttagtgtacg gtccaactcc tactggtaga | 1500 |
| atccataagg gcgtttgttc aacatggatg aaaaacgcgg ttccagcaga gaagtctcac | 1560 |
| gaatgttctg gtgctccaat ctttatcaga gcctccaact tcaaactgcc ttccaatcct | 1620 |
| tctactccta ttgtcatggt cggtcctggt acaggtcttg ctccattcag aggtttctta | 1680 |
| caagagagaa tggccttaaa ggaggatggt gaagagttgg gatcttcttt gttgtttttc | 1740 |
| ggctgtagaa acagacaaat ggatttcatc tacgaagatg aactgaataa ctttgtagat | 1800 |
| caaggagtta tttcagagtt gataatggct ttttctagag aaggtgctca gaaggagtac | 1860 |
| gtccaacaca aaatgatgga aaaggccgca caagtttggg acttaatcaa agaggaaggc | 1920 |
| tatctatatg tctgtggtga tgcaaagggt atggcaagag atgttcacag aacacttcat | 1980 |
| actatagtcc aggaacagga aggcgttagt tcttctgaag cggaagcaat tgtgaaaaag | 2040 |
| ttacaaacag agggaagata cttgagagat gtgtggtaa | 2079 |

SEQ ID NO: 90
Arabidopsis thaliana

| | |
|---|---|
| MTSALYASDL FKQLKSIMGT DSLSDDVVLV IATTSLALVA GFVVLLWKKT TADRSGELKP | 60 |
| LMIPKSLMAK DEDDDLDLGS GKTRVSIFFG TQTGTAEGFA KALSEEIKAR YEKAAVKVID | 120 |
| LDDYAADDDQ YEEKLKKETL AFFCVATYGD GEPTDNAARF YKWFTEENER DIKLQQLAYG | 180 |
| VFALGNRQYE HFNKIGIVLD EELCKKGAKR LIEVGLGDDD QSIEDDFNAW KESLWSELDK | 240 |
| LLKDEDDKSV ATPYTAVIPE YRVVTHDPRF TTQKSMESNV ANGNTTIDIH HPCRVDVAVQ | 300 |
| KELHTHESDR SCIHLEFDIS RTGITYETGD HVGVYAENHV EIVEEAGKLL GHSLDLVFSI | 360 |
| HADKEDGSPL ESAVPPPFPG PCTLGTGLAR YADLLNPPRK SALVALAAYA TEPSEAEKLK | 420 |
| HLTSPDGKDE YSQWIVASQR SLLEVMAAFP SAKPPLGVFF AAIAPRLQPR YYSISSSPRL | 480 |
| APSRVHVTSA LVYGPTPTGR IHKGVCSTWM KNAVPAEKSH ECSGAPIFIR ASNFKLPSNP | 540 |
| STPIVMVGPG TGLAPFRGFL QERMALKEDG EELGSSLLFF GCRNRQMDFI YEDELNNFVD | 600 |
| QGVISELIMA FSREGAQKEY VQHKMMEKAA QVWDLIKEEG YLYVCGDAKG MARDVHRTLH | 660 |
| TIVQEQEGVS SSEAEAIVKK LQTEGRYLRD VW | 692 |

SEQ ID NO: 91
Artificial Sequence

| | |
|---|---|
| atgtcttcct cttcctcttc cagtacctct atgattgatt tgatggctgc tattattaaa | 60 |
| ggtgaaccag ttatcgtctc cgacccagca aatgcctctg cttatgaatc agttgctgca | 120 |
| gaattgtctt caatgttgat cgaaaacaga caattcgcca tgatcgtaac tacatcaatc | 180 |
| gctgttttga tcggttgtat tgtcatgttg gtatggagaa gatccggtag tggtaattct | 240 |
| aaaagagtcg aacctttgaa accattagta attaagccaa gagaagaaga aatagatgac | 300 |
| ggtagaaaga aagttacaat atttttcggt acccaaactg gtacagctga aggttttgca | 360 |
| aaagccttag gtgaagaagc taaggcaaga tacgaaaaga ctagattcaa gatagtcgat | 420 |
| ttggatgact atgccgctga tgacgatgaa tacgaagaaa agttgaagaa agaagatgtt | 480 |
| gcatttttct ttttggcaac ctatggtgac ggtgaaccaa ctgacaatgc agccagattc | 540 |
| tacaaatggt ttacagaggg taatgatcgt ggtgaatggt tgaaaaactt aaagtacggt | 600 |
| gttttcggtt tgggtaacag acaatacgaa catttcaaca aagttgcaaa ggttgtcgac | 660 |
| gatattttgg tcgaacaagg tgctcaaaga ttagtccaag taggtttggg tgacgatgac | 720 |
| caatgtatag aagatgactt tactgcctgg agagaagctt tgtggcctga attagacaca | 780 |
| atcttgagag aagaaggtga caccgccgtt gctaccccat atactgctgc agtattagaa | 840 |
| tacagagttt ccatccatga tagtgaagac gcaaagttta atgatatcac tttggccaat | 900 |
| ggtaacggtt atacagtttt cgatgcacaa cacccttaca aagctaacgt tgcagtcaag | 960 |
| agagaattac atacaccaga atccgacaga agttgtatac acttggaatt tgatatcgct | 1020 |
| ggttccggtt taaccatgaa gttgggtgac catgtaggtg ttttatgcga caatttgtct | 1080 |
| gaaactgttg atgaagcatt gagattgttg gatatgtccc ctgacactta ttttagtttg | 1140 |
| cacgctgaaa aagaagatgg tacaccaatt tccagttctt taccacctcc attccctcca | 1200 |
| tgtaacttaa gaacagcctt gaccagatac gcttgcttgt tatcatcccc taaaaagtcc | 1260 |
| gccttggttg ctttagccgc tcatgctagt gatcctactg aagcagaaag attgaaacac | 1320 |
| ttagcatctc cagccggtaa agatgaatat tcaaagtggg tagttgaatc tcaaagatca | 1380 |
| ttgttagaag ttatggcaga atttccatct gccaagcctc cattaggtgt cttctttgct | 1440 |
| ggtgtagcac ctagattgca accaagattc tactcaatca gttcttcacc taagatcgct | 1500 |
| gaaactagaa ttcatgttac atgtgcatta gtctacgaaa agatgccaac cggtagaatt | 1560 |
| cacaagggtg tatgctctac ttggatgaaa aatgctgttc cttacgaaaa atcagaaaag | 1620 |
| ttgttcttag gtagaccaat cttcgtaaga caatcaaact tcaagttgcc ttctgattca | 1680 |
| aaggttccaa taatcatgat aggtcctggt acaggtttag ccccattcag aggtttcttg | 1740 |
| caagaaagat tggctttagt tgaatctggt gtcgaattag gtccttcagt tttgttcttt | 1800 |
| ggttgtagaa acagaagaat ggatttcatc tatgaagaag aattgcaaag attcgtcgaa | 1860 |
| tctggtgcat tggccgaatt atctgtagct ttttcaagag aaggtccaac taaggaatac | 1920 |
| gttcaacata agatgatgga taaggcatcc gacatatgga acatgatcag tcaaggtgct | 1980 |
| tatttgtacg tttgcggtga cgcaaagggt atggccagag atgtccatag atctttgcac | 2040 |
| acaattgctc aagaacaagg ttccatggat agtaccaaag ctgaaggttt cgtaaagaac | 2100 |
| ttacaaactt ccggtagata cttgagagat gtctggtga | 2139 |

SEQ ID NO: 92
Arabidopsis thaliana

| | |
|---|---|
| MSSSSSSSTS MIDLMAAIIK GEPVIVSDPA NASAYESVAA ELSSMLIENR QFAMIVTTSI | 60 |
| AVLIGCIVML VWRRSGSGNS KRVEPLKPLV IKPREEEIDD GRKKVTIFFG TQTGTAEGFA | 120 |
| KALGEEAKAR YEKTRFKIVD LDDYAADDDE YEEKLKKEDV AFFFLATYGD GEPTDNAARF | 180 |
| YKWFTEGNDR GEWLKNLKYG VFGLGNRQYE HFNKVAKVVD DILVEQGAQR LVQVGLGDDD | 240 |
| QCIEDDFTAW REALWPELDT ILREEGDTAV ATPYTAAVLE YRVSIHDSED AKFNDITLAN | 300 |
| GNGYTVFDAQ HPYKANVAVK RELHTPESDR SCIHLEFDIA GSGLTMKLGD HVGVLCDNLS | 360 |
| ETVDEALRLL DMSPDTYFSL HAEKEDGTPI SSSLPPPFPP CNLRTALTRY ACLLSSPKKS | 420 |
| ALVALAAHAS DPTEAERLKH LASPAGKDEY SKWVVESQRS LLEVMAEFPS AKPPLGVFFA | 480 |
| GVAPRLQPRF YSISSSPKIA ETRIHVTCAL VYEKMPTGRI HKGVCSTWMK NAVPYEKSEK | 540 |
| LFLGRPIFVR QSNFKLPSDS KVPIIMIGPG TGLAPFRGFL QERLALVESG VELGPSVLFF | 600 |
| GCRNRRMDFI YEEELQRFVE SGALAELSVA FSREGPTKEY VQHKMMDKAS DIWNMISQGA | 660 |
| YLYVCGDAKG MARDVHRSLH TIAQEQGSMD STKAEGFVKN LQTSGRYLRD VW | 712 |

SEQ ID NO: 93
Artificial Sequence

| | |
|---|---|
| atggaagcct cttacctata catttctatt ttgcttttac tggcatcata cctgttcacc | 60 |
| actcaactta gaaggaagag cgctaatcta ccaccaaccg tgtttccatc aataccaatc | 120 |
| attggacact tatacttact caaaaagcct ctttatagaa ctttagcaaa aattgccgct | 180 |
| aagtacggac caatactgca attacaactc ggctacagac gtgttctggt gatttcctca | 240 |
| ccatcagcag cagaagagtg ctttaccaat aacgatgtaa tcttcgcaaa tagacctaag | 300 |
| acattgtttg gcaaaatagt gggtggaaca tcccttggca gtttatccta cggcgatcaa | 360 |
| tggcgtaatc taaggagagt agcttctatc gaaatcctat cagttcatag gttgaacgaa | 420 |
| tttcatgata tcagagtgga tgagaacaga ttgttaatta gaaaacttag aagttcatct | 480 |
| tctcctgtta ctcttataac agtcttttat gctctaacat tgaacgtcat tatgagaatg | 540 |
| atctctggca aaagatattt cgacagtggg gatagagaat tggaggagga aggtaagaga | 600 |
| tttcgagaaa tcttagacga aacgttgctt ctagccggtg cttctaatgt tggcgactac | 660 |
| ttaccaatat tgaactggtt gggagttaag tctcttgaaa agaaattgat cgctttgcag | 720 |
| aaaaagagag atgacttttt ccagggtttg attgaacagg ttagaaaatc tcgtggtgct | 780 |
| aaagtaggca aaggtagaaa aacgatgatc gaactcttat tatctttgca agagtcagaa | 840 |
| cctgagtact atacagatgc tatgataaga tcttttgtcc taggtctgct ggctgcaggt | 900 |
| agtgatactt cagcgggcac tatggaatgg gccatgagct tactggtcaa tcacccacat | 960 |
| gtattgaaga aagctcaagc tgaaatcgat agagttatcg gtaataacag attgattgac | 1020 |
| gagtcagaca ttggaaatat cccttacatc gggtgtatta tcaatgaaac tctaagactc | 1080 |
| tatccagcag ggccattgtt gttcccacat gaaagttctg ccgactgcgt tatttccggt | 1140 |
| tacaatatac ctagaggtac aatgttaatc gtaaaccaat gggcgattca tcacgatcct | 1200 |
| aaagtctggg atgatcctga aacctttaaa cctgaaagat ttcaaggatt agaaggaact | 1260 |
| agagatggtt tcaaacttat gccattcggt tctgggagaa gaggatgtcc aggtgaaggt | 1320 |
| ttggcaataa ggctgttagg gatgacacta ggctcagtga tccaatgttt tgattgggag | 1380 |
| agagtaggag atgagatggt tgacatgaca gaaggtttgg gtgtcacact tcctaaggcc | 1440 |
| gttccattag ttgccaaatg taagccacgt tccgaaatga ctaatctcct atccgaactt | 1500 |
| taa | 1503 |

SEQ ID NO: 94
Stevia rebaudiana

| | |
|---|---|
| MEASYLYISI LLLLASYLFT TQLRRKSANL PPTVFPSIPI IGHLYLLKKP LYRTLAKIAA | 60 |
| KYGPILQLQL GYRRVLVISS PSAAEECFTN NDVIFANRPK TLFGKIVGGT SLGSLSYGDQ | 120 |
| WRNLRRVASI EILSVHRLNE FHDIRVDENR LLIRKLRSSS SPVTLITVFY ALTLNVIMRM | 180 |
| ISGKRYFDSG DRELEEEGKR FREILDETLL LAGASNVGDY LPILNWLGVK SLEKKLIALQ | 240 |
| KKRDDFFQGL IEQVRKSRGA KVGKGRKTMI ELLLSLQESE PEYYTDAMIR SFVLGLLAAG | 300 |
| SDTSAGTMEW AMSLLVNHPH VLKKAQAEID RVIGNNRLID ESDIGNIPYI GCIINETLRL | 360 |
| YPAGPLLFPH ESSADCVISG YNIPRGTMLI VNQWAIHHDP KVWDDPETFK PERFQGLEGT | 420 |
| RDGFKLMPFG SGRRGCPGEG LAIRLLGMTL GSVIQCFDWE RVGDEMVDMT EGLGVTLPKA | 480 |
| VPLVAKCKPR SEMTNLLSEL | 500 |

SEQ ID NO: 95
Rubus suavissimus

| | |
|---|---|
| atggaagtaa cagtagctag tagtgtagcc ctgagcctgg tctttattag catagtagta | 60 |
| agatgggcat ggagtgtggt gaattgggtg tggtttaagc cgaagaagct ggaaagattt | 120 |
| ttgagggagc aaggccttaa aggcaattcc tacaggtttt tatatggaga catgaaggag | 180 |
| aactctatcc tgctcaaaca agcaagatcc aaacccatga acctctccac ctcccatgac | 240 |
| atagcacctc aagtcacccc ttttgtcgac caaaccgtga aagcttacgg taagaactct | 300 |
| tttaattggg ttggccccat accaagggtg aacataatga atccagaaga tttgaaggac | 360 |
| gtcttaacaa aaaatgttga ctttgttaag ccaatatcaa acccacttat caagttgcta | 420 |
| gctacaggta ttgcaatcta tgaaggtgag aaatggacta aacacagaag gattatcaac | 480 |
| ccaacattcc attcggagag gctaaagcgt atgttacctt catttcacca aagttgtaat | 540 |
| gagatggtca aggaatggga gagcttggtg tcaaaagagg gttcatcatg tgagttggat | 600 |
| gtctggcctt ttcttgaaaa tatgtcggca gatgtgatct cgagaacagc atttggaact | 660 |
| agctacaaaa aaggacagaa aatctttgaa ctcttgagag agcaagtaat atatgtaacg | 720 |
| aaaggctttc aaagttttta cattccagga tggaggtttc tcccaactaa gatgaacaag | 780 |
| aggatgaatg agattaacga agaaataaaa ggattaatca ggggtattat aattgacaga | 840 |
| gagcaaatca ttaaggcagg tgaagaaacc aacgatgact tattaggtgc acttatggag | 900 |
| tcaaacttga aggacattcg ggaacatggg aaaaacaaca aaaatgttgg gatgagtatt | 960 |
| gaagatgtaa ttcaggagtg taagctgttt tactttgctg ggcaagaaac cacttcagtg | 1020 |
| ttgctggctt ggacaatggt tttacttggt caaaatcaga actggcaaga tcgagcaaga | 1080 |
| caagaggttt tgcaagtctt tggaagcagc aagccagatt ttgatggtct agctcacctt | 1140 |
| aaagtcgtaa ccatgatttt gcttgaagtt cttcgattat acccaccagt cattgaactt | 1200 |
| attcgaacca ttcacaagaa aacacaactt gggaagctct cactaccaga aggagttgaa | 1260 |
| gtccgcttac caacactgct cattcaccat gacaaggaac tgtggggtga tgatgcaaac | 1320 |
| cagttcaatc cagagaggtt ttcggaagga gtttccaaag caacaaagaa ccgactctca | 1380 |
| ttcttcccct tcggagccgg tccacgcatt tgcattggac agaacttttc tatgatggaa | 1440 |
| gcaaagttgg ccttagcatt gatcttgcaa cacttcacct ttgagctttc tccatctcat | 1500 |
| gcacatgctc cttcccatcg tataaccctt caaccacagt atggtgttcg tatcatttta | 1560 |
| catcgacgtt ag | 1572 |

SEQ ID NO: 96
Artificial Sequence

| | |
|---|---|
| atggaagtca ctgtcgcctc ttctgtcgct ttatccttag tcttcatttc cattgtcgtc | 60 |
| agatgggctt ggtccgttgt caactgggtt tggttcaaac caaagaagtt ggaaagattc | 120 |
| ttgagagagc aaggtttgaa gggtaattct tatagattct tgtacggtga catgaaggaa | 180 |
| aattctattt tgttgaagca agccagatcc aaaccaatga acttgtctac ctctcatgat | 240 |
| attgctccac aagttactcc attcgtcgat caaactgtta aagcctacgg taagaactct | 300 |
| ttcaattggg ttggtccaat tcctagagtt aacatcatga acccagaaga tttgaaggat | 360 |
| gtcttgacca agaacgttga cttcgttaag ccaatttcca acccattgat taaattgttg | 420 |
| gctactggta ttgccattta cgaaggtgaa aagtggacta agcatagaag aatcatcaac | 480 |
| cctaccttcc actctgaaag attgaagaga atgttaccat ctttccatca atcctgtaat | 540 |
| gaaatggtta aggaatggga atccttggtt tctaaagaag gttcttcttg cgaattggat | 600 |
| gtttggccat tcttggaaaa tatgtctgct gatgtcattt ccagaaccgc tttcggtacc | 660 |
| tcctacaaga agggtcaaaa gattttcgaa ttgttgagag agcaagttat ttacgttacc | 720 |
| aagggtttcc aatccttcta catcccaggt tggagattct tgccaactaa aatgaacaag | 780 |
| cgtatgaacg agatcaacga agaaattaaa ggtttgatca gaggtattat tatcgacaga | 840 |
| gaacaaatta ttaaagctgg tgaagaaacc aacgatgatt tgttgggtgc tttgatggag | 900 |
| tccaacttga aggatattag agaacatggt aagaacaaca agaatgttgg tatgtctatt | 960 |
| gaagatgtta ttcaagaatg taagttattc tacttcgctg gtcaagagac cacttctgtt | 1020 |
| ttgttagcct ggactatggt cttgttaggt caaaaccaaa attggcaaga tagagctaga | 1080 |
| caagaagttt tgcaagtctt cggttcttcc aagccagact ttgatggttt ggcccacttg | 1140 |
| aaggttgtta ctatgatttt gttagaagtt ttgagattgt acccaccagt cattgagtta | 1200 |
| atcagaacca ttcataaaaa gactcaattg ggtaaattat ctttgccaga aggtgttgaa | 1260 |
| gtcagattac caaccttgtt gattcaccac gataaggaat tatggggtga cgacgctaat | 1320 |
| caatttaatc cagaaagatt ttccgaaggt gtttccaagg ctaccaaaaa ccgtttgtcc | 1380 |
| ttcttcccat ttggtgctgg tccacgtatt tgtatcggtc aaaacttttc catgatggaa | 1440 |
| gccaagttgg ctttggcttt aatcttgcaa cacttcactt tcgaattgtc tccatcccat | 1500 |
| gcccacgctc cttctcatag aatcacttta caaccacaat acggtgtcag aatcatctta | 1560 |
| cacagaagat aa | 1572 |

SEQ ID NO: 97
Rubus suavissimus

| | |
|---|---|
| MEVTVASSVA LSLVFISIVV RWAWSVVNWV WFKPKKLERF LREQGLKGNS YRFLYGDMKE | 60 |
| NSILLKQARS KPMNLSTSHD IAPQVTPFVD QTVKAYGKNS FNWVGPIPRV NIMNPEDLKD | 120 |
| VLTKNVDFVK PISNPLIKLL ATGIAIYEGE KWTKHRRIIN PTFHSERLKR MLPSFHQSCN | 180 |
| EMVKEWESLV SKEGSSCELD VWPFLENMSA DVISRTAFGT SYKKGQKIFE LLREQVIYVT | 240 |
| KGFQSFYIPG WRFLPTKMNK RMNEINEEIK GLIRGIIIDR EQIIKAGEET NDDLLGALME | 300 |
| SNLKDIREHG KNNKNVGMSI EDVIQECKLF YFAGQETTSV LLAWTMVLLG QNQNWQDRAR | 360 |
| QEVLQVFGSS KPDFDGLAHL KVVTMILLEV LRLYPPVIEL IRTIHKKTQL GKLSLPEGVE | 420 |
| VRLPTLLIHH DKELWGDDAN QFNPERFSEG VSKATKNRLS FFPFGAGPRI CIGQNFSMME | 480 |
| AKLALALILQ HFTFELSPSH AHAPSHRITL QPQYGVRIIL HRR | 523 |

SEQ ID NO: 98
Prunus avium

| | |
|---|---|
| atggaagcat caagggctag ttgtgttgcg ctatgtgttg tttgggtgag catagtaatt | 60 |
| acattggcat ggagggtgct gaattgggtg tggttgaggc caaagaaact agaaagatgc | 120 |
| ttgagggagc aaggccttac aggcaattct tacaggcttt tgtttggaga caccaaggat | 180 |
| ctctcgaaga tgctggaaca aacacaatcc aaacccatca aactctccac ctcccatgat | 240 |
| atagcgccac gagtcacccc atttttccat cgaactgtga actctaatgg caagaattct | 300 |
| tttgtttgga tgggccctat accaagagtg cacatcatga atccagaaga tttgaaagat | 360 |
| gccttcaaca gacatgatga ttttcataag acagtaaaaa atcctatcat gaagtctcca | 420 |
| ccaccgggca ttgtaggcat tgaaggtgag caatgggcta aacacagaaa gattatcaac | 480 |
| ccagcattcc atttagagaa gctaaagggt atggtaccaa tattttacca aagttgtagc | 540 |
| gagatgatta acaaatggga gagcttggtg tccaaagaga gttcatgtga gttggatgtg | 600 |
| tggccttatc ttgaaaattt taccagcgat gtgatttccc gagctgcatt tggaagtagc | 660 |
| tatgaagagg gaaggaaaat atttcaacta ctaagagagg aagcaaaagt ttattcggta | 720 |
| gctctacgaa gtgtttacat tccaggatgg aggtttctac caaccaagca gaacaagaag | 780 |
| acgaaggaaa ttcacaatga aattaaaggc ttacttaagg gcattataaa taaaagggaa | 840 |
| gaggcgatga aggcagggga agccactaaa gatgacttac taggaatact tatggagtcc | 900 |
| aacttcaggg aaattcagga acatgggaac aacaaaaatg ctggaatgag tattgaagat | 960 |
| gtaattggag agtgtaagtt gttttacttt gctgggcaag agaccacttc ggtgttgctt | 1020 |
| gtttggacaa tgattttact aagccaaaat caggattggc aagctcgtgc aagagaagag | 1080 |
| gtcttgaaag tctttggaag caacatccca acctatgaag agctaagtca cctaaaagtt | 1140 |
| gtgaccatga ttttacttga agttcttcga ttatacccat cagtcgttgc gcttcctcga | 1200 |
| accactcaca agaaaacaca gcttggaaaa ttatcattac cagctggagt ggaagtctcc | 1260 |
| ttgcccatac tgcttgttca ccatgacaaa gagttgtggg gtgaggatgc aaatgagttc | 1320 |
| aagccagaga ggttttcaga gggagtttca aaggcaacaa agaacaaatt tacatactta | 1380 |
| cctttcggag ggggtccaag gatttgcatt ggacaaaact ttgccatggt ggaagctaaa | 1440 |
| ttggccttgg ccctgatttt acaacacttt gcctttgagc tttctccatc ctatgctcat | 1500 |
| gctccttctg cagttataac ccttcaacct caatttggtg ctcatatcat tttgcataaa | 1560 |
| cgttga | 1566 |

SEQ ID NO: 99
Artificial Sequence

| | |
|---|---|
| atggaagctt ctagagcatc ttgtgttgct ttgtgtgttg tttgggtttc catcgttatt | 60 |
| actttggctt ggagagtttt gaattgggtc tggttaagac caaaaaagtt ggaaagatgc | 120 |
| ttgagagaac aaggtttgac tggtaactct tacagattgt tgttcggtga taccaaggac | 180 |
| ttgtctaaga tgttggaaca aactcaatcc aagcctatca agttgtctac ctctcatgat | 240 |
| attgctccaa gagttactcc attcttccat agaactgtta actccaacgg taagaactct | 300 |
| tttgtttgga tgggtccaat tccaagagtc catattatga accctgaaga tttgaaggac | 360 |
| gctttcaaca gacatgatga tttccataag accgtcaaga acccaattat gaagtctcca | 420 |
| ccaccaggta tagttggtat tgaaggtgaa caatgggcca aacatagaaa gattattaac | 480 |
| ccagccttcc acttggaaaa gttgaaaggt atggttccaa tcttctacca atcctgctct | 540 |
| gaaatgatta acaagtggga atccttggtt tccaaagaat cttcctgtga attggatgtc | 600 |
| tggccatatt tggaaaactt cacctccgat gttatttcca gagctgcttt tggttcttct | 660 |
| tacgaagaag gtagaaagat cttccaatta ttgagagaag aagccaaggt ttactccgtt | 720 |
| gctttgagat ctgtttacat tccaggttgg agattcttgc caactaagca aaacaaaaag | 780 |
| accaaagaaa tccacaacga aatcaagggt ttgttgaagg gtatcatcaa caagagagaa | 840 |
| gaagctatga aggctggtga agctacaaaa gatgatttgt tgggtatctt gatggaatcc | 900 |
| aacttcagag aaatccaaga acacggtaac aacaagaatg ccggtatgtc tattgaagat | 960 |
| gttatcggtg aatgcaagtt gttctacttt gctggtcaag aaactacctc cgttttgttg | 1020 |
| gtttggacca tgattttgtt gtcccaaaat caagattggc aagctagagc tagagaagaa | 1080 |
| gtcttgaaag ttttcggttc taacatccca acctacgaag aattgtctca cttgaaggtt | 1140 |
| gtcactatga tcttgttgga agtattgaga ttatacccat ccgttgttgc attgccaaga | 1200 |
| actactcata agaaaactca attgggtaaa ttgtccttgc cagctggtgt tgaagtttct | 1260 |
| ttgccaattt tgttagtcca ccacgacaaa gaattgtggg gtgaagatgc taatgaattc | 1320 |
| aagccagaaa gattctccga aggtgtttct aaagctacca agaacaagtt cacttacttg | 1380 |
| ccatttggtg gtggtccaag aatatgtatt ggtcaaaatt tcgctatggt cgaagctaaa | 1440 |
| ttggctttgg ctttgatctt gcaacatttc gctttcgaat tgtcaccatc ttatgctcat | 1500 |
| gctccatctg ctgttattac attgcaacca caatttggtg cccatatcat cttgcataag | 1560 |
| agataac | 1567 |

SEQ ID NO: 100
Prunus avium

| | |
|---|---|
| MEASRASCVA LCVVWVSIVI TLAWRVLNWV WLRPKKLERC LREQGLTGNS YRLLFGDTKD | 60 |
| LSKMLEQTQS KPIKLSTSHD IAPRVTPFFH RTVNSNGKNS FVWMGPIPRV HIMNPEDLKD | 120 |
| AFNRHDDFHK TVKNPIMKSP PPGIVGIEGE QWAKHRKIIN PAFHLEKLKG MVPIFYQSCS | 180 |
| EMINKWESLV SKESSCELDV WPYLENFTSD VISRAAFGSS YEEGRKIFQL LREEAKVYSV | 240 |
| ALRSVYIPGW RFLPTKQNKK TKEIHNEIKG LLKGIINKRE EAMKAGEATK DDLLGILMES | 300 |
| NFREIQEHGN NKNAGMSIED VIGECKLFYF AGQETTSVLL VWTMILLSQN QDWQARAREE | 360 |
| VLKVFGSNIP TYEELSHLKV VTMILLEVLR LYPSVVALPR TTHKKTQLGK LSLPAGVEVS | 420 |
| LPILLVHHDK ELWGEDANEF KPERFSEGVS KATKNKFTYL PFGGGPRICI GQNFAMVEAK | 480 |
| LALALILQHF AFELSPSYAH APSAVITLQP QFGAHIILHK R | 521 |

SEQ ID NO: 101
Prunus mume

| | |
|---|---|
| ASWVAVLSVV WVSMVIAWAW RVLNWVWLRP KKLEKCLREQ GLAGNSYRLL FGDTKDLSKM | 60 |
| LEQTQSKPIK LSTSHDIAPH VTPFFHQTVN SYGKNSFVWM GPIPRVHIMN PEDLKDTFNR | 120 |
| HDDFHKVVKN PIMKSLPQGI VGIEGEQWAK HRKIINPAFH LEKLKGMVPI FYRSCSEMIN | 180 |
| KWESLVSKES SCELDVWPYL ENFTSDVISR AAFGSSYEEG RKIFQLLREE AKIYTVAMRS | 240 |
| VYIPGWRFLP TKQNKKAKEI HNEIKGLLKG IINKREEAMK AGEATKDDLL GILMESNFRE | 300 |
| IQEHGNNKNA GMSIEDVIGE CKLFYFAGQE TTSVLLVWTM VLLSQNQDWQ ARAREEVLQV | 360 |
| FGSNIPTYEE LSQLKVVTMI LLEVLRLYPS VVALPRTTHK KTQLGKLSLP AGVEVSLPIL | 420 |
| LVHHDKELWG EDANEFKPER FSEGVSKATK NQFTYFPFGG GPRICIGQNF AMMEAKLALS | 480 |
| LILRHFALEL SPLYAHAPSV TITLQPQYGA HIILHKR | 517 |

SEQ ID NO: 102
Prunus mume

| | |
|---|---|
| MEASRPSCVA LSVVLVSIVI AWAWRVLNWV WLRPNKLERC LREQGLTGNS YRLLFGDTKE | 60 |
| ISMMVEQAQS KPIKLSTTHD IAPRVIPFSH QIVYTYGRNS FVWMGPTPRV TIMNPEDLKD | 120 |
| AFNKSDEFQR AISNPIVKSI SQGLSSLEGE KWAKHRKIIN PAFHLEKLKG MLPTFYQSCS | 180 |
| EMINKWESLV FKEGSREMDV WPYLENLTSD VISRAAFGSS YEEGRKIFQL LREEAKFYTI | 240 |
| AARSVYIPGW RFLPTKQNKR MKEIHKEVRG LLKGIINKRE DAIKAGEAAK GNLLGILMES | 300 |
| NFREIQEHGN NKNAGMSIED VIGECKLFYF AGQETTSVLL VWTLVLLSQN QDWQARAREE | 360 |
| VLQVFGTNIP TYDQLSHLKV VTMILLEVLR LYPAVVELPR TTYKKTQLGK FLLPAGVEVS | 420 |
| LHIMLAHHDK ELWGEDAKEF KPERFSEGVS KATKNQFTYF PFGAGPRICI GQNFAMLEAK | 480 |
| LALSLILQHF TFELSPSYAH APSVTITLHP QFGAHFILHK R | 521 |

SEQ ID NO: 103
Prunus mume

| | |
|---|---|
| CVALSVVLVS IVIAWAWRVL NWVWLRPNKL ERCLREQGLT GNSYRLLFGD TKEISMMVEQ | 60 |
| AQSKPIKLST THDIAPRVIP FSHQIVYTYG RNSFVWMGPT PRVTIMNPED LKDAFNKSDE | 120 |
| FQRAISNPIV KSISQGLSSL EGEKWAKHRK IINPAFHLEK LKGMLPTFYQ SCSEMINKWE | 180 |
| SLVFKEGSRE MDVWPYLENL TSDVISRAAF GSSYEEGRKI FQLLREEAKF YTIAARSVYI | 240 |
| PGWRFLPTKQ NKRMKEIHKE VRGLLKGIIN KREDAIKAGE AAKGNLLGIL MESNFREIQE | 300 |
| HGNNKNAGMS IEDVIGECKL FYFAGQETTS VLLVWTLVLL SQNQDWQARA REEVLQVFGT | 360 |
| NIPTYDQLSH LKVVTMILLE VLRLYPAVVE LPRTTYKKTQ LGKFLLPAGV EVSLHIMLAH | 420 |
| HDKELWGEDA KEFKPERFSE GVSKATKNQF TYFPFGAGPR ICIGQNFAML EAKLALSLIL | 480 |
| QHFTFELSPS YAHAPSVTIT LHPQFGAHFI LHKR | 514 |

SEQ ID NO: 104
Prunus persica

| | |
|---|---|
| MGPIPRVHIM NPEDLKDTFN RHDDFHKVVK NPIMKSLPQG IVGIEGDQWA KHRKIINPAF | 60 |
| HLEKLKGMVP IFYQSCSEMI NIWKSLVSKE SSCELDVWPY LENFTSDVIS RAAFGSSYEE | 120 |
| GRKIFQLLRE EAKVYTVAVR SVYIPGWRFL PTKQNKKTKE IHNEIKGLLK GIINKREEAM | 180 |
| KAGEATKDDL LGILMESNFR EIQEHGNNKN AGMSIEDVIG ECKLFYFAGQ ETTSVLLVWT | 240 |
| MVLLSQNQDW QARAREEVLQ VFGSNIPTYE ELSHLKVVTM ILLEVLRLYP SVVALPRTTH | 300 |
| KKTQLGKLSL PAGVEVSLPI LLVHHDKELW GEDANEFKPE RFSEGVSKAT KNQFTYFPFG | 360 |
| GGPRICIGQN FAMMEAKLAL SLILQHFTFE LSPQYSHAPS VTITLQPQYG AHLILHKR | 418 |

SEQ ID NO: 105
Artificial Sequence

| | |
|---|---|
| atgggtttgt tcccattaga ggattcctac gcgctggtct ttgaaggact agcaataaca | 60 |
| ctggctttgt actatctact gtctttcatc tacaaaacat ctaaaaagac atgtacacct | 120 |
| cctaaagcat ctggtgaaat cattccaatt acaggaatca tattgaatct gctatctggc | 180 |
| tcaagtggtc tacctattat cttagcactt gcctctttag cagacagatg tggtcctatt | 240 |
| ttcaccatta ggctgggtat taggagagtg ctagtagtat caaattggga aatcgctaag | 300 |
| gagattttca ctacccacga tttgatagtt tctaatagac caaaatactt agccgctaag | 360 |
| attcttggtt tcaattatgt ttcattctct ttcgctccat acggcccata ttgggtcgga | 420 |
| atcagaaaga ttattgctac aaaactaatg tcttcttcca gacttcagaa gttgcaattt | 480 |
| gtaagagttt ttgaactaga aaactctatg aaatctatca gagaatcatg gaaggagaaa | 540 |
| aaggatgaag agggaaaggt attagttgag atgaaaaagt ggttctggga actgaatatg | 600 |
| aacatagtgt taaggacagt tgctggtaaa caatacactg gtacagttga tgatgccgat | 660 |
| gcaaagcgta tctccgagtt attcagagaa tggtttcact acactggcag atttgtcgtt | 720 |
| ggagacgctt ttccttttct aggttggttg gacctgggcg gatacaaaaa gacaatggaa | 780 |
| ttagttgcta gtagattgga ctcaatggtc agtaaatggt tagatgagca tcgtaaaaag | 840 |
| caagctaacg atgacaaaaa ggaggatatg gatttcatgg atatcatgat ctccatgaca | 900 |
| gaagcaaatt caccacttga aggatacggc actgatacta ttatcaagac cacatgtatg | 960 |
| actttgattg tttcaggagt tgatacaacc tcaatcgtac ttacttgggc cttatcactt | 1020 |
| ttgttaaaca acagagatac tttgaaaaag gcacaagagg aattagatat gtgcgtaggt | 1080 |
| aaaggaagac aagtcaacga gtctgatctt gttaacttga tatacttgga agcagtgctt | 1140 |
| aaagaggctt taagacttta cccagcagcg ttcttaggcg gaccaagagc attcttggaa | 1200 |
| gattgtactg ttgctggtta tagaattcca aagggcacct gcttgttgat taacatgtgg | 1260 |
| aaactgcata gagatccaaa catttggagt gatccttgcg aattcaagcc agaaagattt | 1320 |
| ttgacaccta atcaaaagga tgttgatgtg atcggtatgg atttcgaatt gataccattt | 1380 |
| ggtgccggca gaagatattg tccaggtact agattggctt tacagatgtt gcatatcgta | 1440 |
| ttagcgacat tgctgcaaaa cttcgaaatg tcaacaccaa acgatgcgcc agtcgatatg | 1500 |
| actgcttctg ttggcatgac aaatgccaaa gcatcacctt tagaagtctt gctatcacct | 1560 |
| cgtgttaaat ggtcctaa | 1578 |

SEQ ID NO: 106
Stevia rebaudiana

| | |
|---|---|
| MGLFPLEDSY ALVFEGLAIT LALYYLLSFI YKTSKKTCTP PKASGEHPIT GHLNLLSGSS | 60 |
| GLPHLALASL ADRCGPIFTI RLGIRRVLVV SNWEIAKEIF TTHDLIVSNR PKYLAAKILG | 120 |
| FNYVSFSFAP YGPYWVGIRK IIATKLMSSS RLQKLQFVRV FELENSMKSI RESWKEKKDE | 180 |
| EGKVLVEMKK WFWELNMNIV LRTVAGKQYT GTVDDADAKR ISELFREWFH YTGRFVVGDA | 240 |
| FPFLGWLDLG GYKKTMELVA SRLDSMVSKW LDEHRKKQAN DDKKEDMDFM DIMISMTEAN | 300 |
| SPLEGYGTDT IIKTTCMTLI VSGVDTTSIV LTWALSLLLN NRDTLKKAQE ELDMCVGKGR | 360 |
| QVNESDLVNL IYLEAVLKEA LRLYPAAFLG GPRAFLEDCT VAGYRIPKGT CLLINMWKLH | 420 |
| RDPNIWSDPC EFKPERFLTP NQKDVDVIGM DFELIPFGAG RRYCPGTRLA LQMLHIVLAT | 480 |
| LLQNFEMSTP NDAPVDMTAS VGMTNAKASP LEVLLSPRVK WS | 522 |

SEQ ID NO: 107
Artificial Sequence

| | |
|---|---|
| atgatacaag ttttaactcc aattctactc ttcctcatct tcttcgtttt ctggaaagtc | 60 |
| tacaaacatc aaaagactaa aatcaatcta ccaccaggtt ccttcggctg gccatttttg | 120 |
| ggtgaaacct tagccttact tagagcaggc tgggattctg agccagaaag attcgtaaga | 180 |
| gagcgtatca aaaagcatgg atctccactt gttttcaaga catcactatt tggagacaga | 240 |
| ttcgctgttc tttgcggtcc agctggtaat aagtttttgt tctgcaacga aaacaaatta | 300 |
| gtggcatctt ggtggccagt ccctgtaagg aagttgttcg gtaaaagttt actcacaata | 360 |
| agaggagatg aagcaaaatg gatgagaaaa atgctattgt cttacttggg tccagatgca | 420 |
| tttgccacac attatgccgt tactatggat gttgtaacac gtagacatat tgatgtccat | 480 |
| tggaggggca aggaggaagt taatgtattt caaacagtta agttgtacgc attcgaatta | 540 |
| gcttgtagat tattcatgaa cctagatgac ccaaaccaca tcgcgaaact cggtagtctt | 600 |
| ttcaacattt tcctcaaagg gatcatcgag cttcctatag acgttcctgg aactagattt | 660 |
| tactccagta aaaaggccgc agctgccatt agaattgaat tgaaaaagct cattaaagct | 720 |
| agaaaactcg aattgaagga gggtaaggcg tcttcttcac aggacttgct ttctcatcta | 780 |
| ttaacatcac ctgatgagaa tgggatgttc ttgacagaag aggaaatagt cgataacatt | 840 |
| ctacttttgt tattcgctgg tcacgatacc tctgcactat caataacact tttgatgaaa | 900 |
| accttaggtg aacacagtga tgtgtacgac aaggttttga aggaacaatt agaaatttcc | 960 |
| aaaacaaagg aggcttggga atcactaaag tgggaagata tccagaagat gaagtactca | 1020 |
| tggtcagtaa tctgtgaagt catgagattg aatcctcctg tcatagggac atacagagag | 1080 |
| gcgttggttg atatcgacta tgctggttac actatcccaa aaggatggaa gttgcattgg | 1140 |
| tcagctgttt ctactcaaag agacgaagcc aatttcgaag atgtaactag attcgatcca | 1200 |
| tccagatttg aaggggcagg ccctactcca ttcacatttg tgcctttcgg tggaggtcct | 1260 |
| agaatgtgtt taggcaaaga gtttgccagg ttagaagtgt tagcatttct ccacaacatt | 1320 |
| gttaccaact ttaagtggga tcttctaatc cctgatgaga agatcgaata tgatccaatg | 1380 |
| gctactccag ctaagggctt gccaattaga cttcatccac accaagtcta a | 1431 |

SEQ ID NO: 108
Stevia rebaudiana

| | |
|---|---|
| MIQVLTPILL FLIFFVFWKV YKHQKTKINL PPGSFGWPFL GETLALLRAG WDSEPERFVR | 60 |
| ERIKKHGSPL VFKTSLFGDR FAVLCGPAGN KFLFCNENKL VASWWPVPVR KLFGKSLLTI | 120 |
| RGDEAKWMRK MLLSYLGPDA FATHYAVTMD VVTRRHIDVH WRGKEEVNVF QTVKLYAFEL | 180 |
| ACRLFMNLDD PNHIAKLGSL FNIFLKGIIE LPIDVPGTRF YSSKKAAAAI RIELKKLIKA | 240 |
| RKLELKEGKA SSSQDLLSHL LTSPDENGMF LTEEEIVDNI LLLLFAGHDT SALSITLLMK | 300 |
| TLGEHSDVYD KVLKEQLEIS KTKEAWESLK WEDIQKMKYS WSVICEVMRL NPPVIGTYRE | 360 |
| ALVDIDYAGY TIPKGWKLHW SAVSTQRDEA NFEDVTRFDP SRFEGAGPTP FTFVPFGGGP | 420 |
| RMCLGKEFAR LEVLAFLHNI VTNFKWDLLI PDEKIEYDPM ATPAKGLPIR LHPHQV | 476 |

SEQ ID NO: 109
Artificial Sequence

| | |
|---|---|
| atggagtctt tagtggttca tacagtaaat gctatctggt gtattgtaat cgtcgggatt | 60 |
| ttctcagttg gttatcacgt ttacggtaga gctgtggtcg aacaatggag aatgagaaga | 120 |
| tcactgaagc tacaaggtgt taaaggccca ccaccatcca tcttcaatgg taacgtctca | 180 |
| gaaatgcaac gtatccaatc cgaagctaaa cactgctctg gcgataacat tatctcacat | 240 |
| gattattctt cttcattatt cccacacttc gatcactgga gaaaacagta cggcagaatc | 300 |
| tacacatact ctactggatt aaagcaacac ttgtacatca atcatccaga aatggtgaag | 360 |
| gagctatctc agactaacac attgaacttg ggtagaatca cccatataac caaaagattg | 420 |
| aatcctatct taggtaacgg aatcataacc tctaatggtc ctcattgggc ccatcagcgt | 480 |
| agaattatcg cctacgagtt tactcatgat aagatcaagg gtatggttgg tttgatggtt | 540 |
| gagtctgcta tgcctatgtt gaataagtgg gaggagatgg taaagagagg cggagaaatg | 600 |
| ggatgcgaca taagagttga tgaggacttg aaagatgttt cagcagatgt gattgcaaaa | 660 |
| gcctgtttcg gatcctcatt ttctaaaggt aaggctattt tctctatgat aagagatttg | 720 |
| cttacagcta tcacaaagag aagtgttcta ttcagattca acggattcac tgatatggtc | 780 |
| tttgggagta aaaagcatgg tgacgttgat atagacgctt tagaaatgga attggaatca | 840 |
| tccatttggg aaactgtcaa ggaacgtgaa atagaatgta aagatactca caaaaaggat | 900 |
| ctgatgcaat tgattttgga aggggcaatg cgttcatgtg acggtaacct ttgggataaa | 960 |
| tcagcatata gaagatttgt tgtagataat tgtaaatcta tctacttcgc agggcatgat | 1020 |
| agtacagctg tctcagtgtc atggtgtttg atgttactgg ccctaaaccc atcatggcaa | 1080 |
| gttaagatcc gtgatgaaat tctgtcttct tgcaaaaatg gtattccaga tgccgaaagt | 1140 |
| atcccaaacc ttaaaacagt gactatggtt attcaagaga caatgagatt ataccctcca | 1200 |
| gcaccaatcg tcgggagaga agcctctaaa gatatcagat tgggcgatct agttgttcct | 1260 |
| aaaggcgtct gtatatggac actaatacca gctttacaca gagatcctga gatttgggga | 1320 |
| ccagatgcaa acgatttcaa accagaaaga ttttctgaag gaatttcaaa ggcttgtaag | 1380 |
| tatcctcaaa gttacattcc atttggtctg ggtcctagaa catgcgttgg taaaaacttt | 1440 |
| ggcatgatgg aagtaaaggt tcttgtttcc ctgattgtct ccaagttctc tttcactcta | 1500 |
| tctcctacct accaacatag tcctagtcac aaacttttag tagaaccaca acatggggtg | 1560 |
| gtaattagag tggtttaa | 1578 |

SEQ ID NO: 110
Arabidopsis thaliana

| | |
|---|---|
| MESLVVHTVN AIWCIVIVGI FSVGYHVYGR AVVEQWRMRR SLKLQGVKGP PPSIFNGNVS | 60 |
| EMQRIQSEAK HCSGDNIISH DYSSSLFPHF DHWRKQYGRI YTYSTGLKQH LYINHPEMVK | 120 |
| ELSQTNTLNL GRITHITKRL NPILGNGIIT SNGPHWAHQR RIIAYEFTHD KIKGMVGLMV | 180 |
| ESAMPMLNKW EEMVKRGGEM GCDIRVDEDL KDVSADVIAK ACFGSSFSKG KAIFSMIRDL | 240 |
| LTAITKRSVL FRFNGFTDMV FGSKKHGDVD IDALEMELES SIWETVKERE IECKDTHKKD | 300 |
| LMQLILEGAM RSCDGNLWDK SAYRRFVVDN CKSIYFAGHD STAVSVSWCL MLLALNPSWQ | 360 |
| VKIRDEILSS CKNGIPDAES IPNLKTVTMV IQETMRLYPP APIVGREASK DIRLGDLVVP | 420 |
| KGVCIWTLIP ALHRDPEIWG PDANDFKPER FSEGISKACK YPQSYIPFGL GPRTCVGKNF | 480 |
| GMMEVKVLVS LIVSKFSFTL SPTYQHSPSH KLLVEPQHGV VIRVV | 525 |

SEQ ID NO: 111
Artificial Sequence

| | |
|---|---|
| atgtacttcc tactacaata cctcaacatc acaaccgttg gtgtctttgc cacattgttt | 60 |
| ctctcttatt gtttacttct ctggagaagt agagcgggta acaaaaagat tgccccagaa | 120 |
| gctgccgctg catggcctat tatcggccac ctccacttac ttgcaggtgg atcccatcaa | 180 |
| ctaccacata ttacattggg taacatggca gataagtacg gtcctgtatt cacaatcaga | 240 |
| ataggcttgc atagagctgt agttgtctca tcttgggaaa tggcaaagga atgttcaaca | 300 |
| gctaatgatc aagtgtcttc ttcaagacct gaactattag cttctaagtt gttgggttat | 360 |
| aactacgcca tgtttggttt ttcaccatac ggttcatact ggagagaaat gagaaagatc | 420 |
| atctctctcg aattactatc taattccaga ttggaactat tgaaagatgt tagagcctca | 480 |
| gaagttgtca catctattaa ggaactatac aaattgtggg cggaaaagaa gaatgagtca | 540 |
| ggattggttt ctgtcgagat gaaacaatgg ttcggagatt tgactttaaa cgtgatcttg | 600 |
| agaatggtgg ctggtaaaag atacttctcc gcgagtgacg cttcagaaaa caaacaggcc | 660 |
| cagcgttgta gaagagtctt cagagaattc ttccatctct ccggcttgtt tgtggttgct | 720 |
| gatgctatac cttttcttgg atggctcgat tggggaagac acgagaagac cttgaaaaag | 780 |
| accgccatag aaatggattc catcgcccag gagtggcttg aggaacatag acgtagaaaa | 840 |
| gattctggag atgataattc tacccaagat ttcatggacg ttatgcaatc tgtgctagat | 900 |
| ggcaaaaatc taggcggata cgatgctgat acgattaaca aggctacatg cttaactctt | 960 |
| atatcaggtg gcagtgatac tactgtagtt tctttgacat gggctcttag tcttgtgtta | 1020 |
| aacaatagag atactttgaa aaaggcacag gaagagttag acatccaagt cggtaaggaa | 1080 |
| agattggtta acgagcaaga catcagtaag ttagtttact tgcaagcaat agtaaaagag | 1140 |
| acactcagac tttatccacc aggtcctttg ggtggtttga gacaattcac tgaagattgt | 1200 |
| acactaggtg gctatcacgt ttcaaaagga actagattaa tcatgaactt atccaagatt | 1260 |
| caaaaagatc cacgtatttg gtctgatcct actgaattcc aaccagagag attccttacg | 1320 |
| actcataaag atgtcgatcc acgtggtaaa cactttgaat tcattccatt cggtgcagga | 1380 |
| agacgtgcat gtcctggtat cacattcgga ttacaagtac tacatctaac attggcatct | 1440 |
| ttcttgcatg cgtttgaatt ttcaacacca tcaaatgagc aggttaacat gagagaatca | 1500 |
| ttaggtctta cgaatatgaa atctacccca ttagaagttt tgatttctcc aagactatcc | 1560 |
| cttaattgct tcaaccttat gaaaatttga | 1590 |

SEQ ID NO: 112
Vitis vinifera

| | |
|---|---|
| MYFLLQYLNI TTVGVFATLF LSYCLLLWRS RAGNKKIAPE AAAAWPIIGH LHLLAGGSHQ | 60 |
| LPHITLGNMA DKYGPVFTIR IGLHRAVVVS SWEMAKECST ANDQVSSSRP ELLASKLLGY | 120 |
| NYAMFGFSPY GSYWREMRKI ISLELLSNSR LELLKDVRAS EVVTSIKELY KLWAEKKNES | 180 |
| GLVSVEMKQW FGDLTLNVIL RMVAGKRYFS ASDASENKQA QRCRRVFREF FHLSGLFVVA | 240 |
| DAIPFLGWLD WGRHEKTLKK TAIEMDSIAQ EWLEEHRRRK DSGDDNSTQD FMDVMQSVLD | 300 |
| GKNLGGYDAD TINKATCLTL ISGGSDTTVV SLTWALSLVL NNRDTLKKAQ EELDIQVGKE | 360 |
| RLVNEQDISK LVYLQAIVKE TLRLYPPGPL GGLRQFTEDC TLGGYHVSKG TRLIMNLSKI | 420 |
| QKDPRIWSDP TEFQPERFLT THKDVDPRGK HFEFIPFGAG RRACPGITFG LQVLHLTLAS | 480 |
| FLHAFEFSTP SNEQVNMRES LGLTNMKSTP LEVLISPRLS SCSLYN | 526 |

SEQ ID NO: 113
Artificial Sequence

| | |
|---|---|
| atggaaccta acttttactt gtcattacta ttgttgttcg tgaccttcat ttctttaagt | 60 |
| ctgtttttca tcttttacaa acaaaagtcc ccattgaatt tgccaccagg gaaaatgggt | 120 |
| taccctatca taggtgaaag tttagaattc ctatccacag gctggaaggg acatcctgaa | 180 |
| aagttcatat ttgatagaat gcgtaagtac agtagtgagt tattcaagac ttctattgta | 240 |
| ggcgaatcca cagttgtttg ctgtggggca gctagtaaca aattcctatt ctctaacgaa | 300 |
| aacaaactgg taactgcctg gtggccagat tctgttaaca aaatcttccc aacaacttca | 360 |
| ctggattcta atttgaagga ggaatctata aagatgagaa agttgctgcc acagttcttc | 420 |
| aaaccagaag cacttcaaag atacgtcggc gttatggatg taatcgcaca aagacatttt | 480 |
| gtcactcact gggacaacaa aaatgagatc acagtttatc cacttgctaa aagatacact | 540 |
| ttcttgcttg cgtgtagact gttcatgtct gttgaggatg aaaatcatgt ggcgaaattc | 600 |
| tcagacccat tccaactaat cgctgcaggc atcatttcac ttcctatcga tcttcctggt | 660 |
| actccattca acaaggccat aaaggcttca aatttcatta gaaaagagct gataaagatt | 720 |
| atcaaacaaa gacgtgttga tctggcagag ggtacagcat ctccaaccca ggatatcttg | 780 |
| tcacatatgc tattaacatc tgatgaaaac ggtaaatcta tgaacgagtt gaacattgcc | 840 |
| gacaagattc ttggactatt gataggaggc cacgatacag cttcagtagc ttgcacattt | 900 |
| ctagtgaagt acttaggaga attaccacat atctacgata aagtctacca agagcaaatg | 960 |
| gaaattgcca agtccaaacc tgctggggaa ttgttgaatt gggatgactt gaaaaagatg | 1020 |
| aagtattcat ggaatgtggc atgtgaggta atgagattgt caccaccttt acaaggtggt | 1080 |
| tttagagagg ctataactga ctttatgttt aacggtttct ctattccaaa agggtggaag | 1140 |
| ttatactggt ccgccaactc tacacacaaa aatgcagaat gtttcccaat gcctgagaaa | 1200 |
| ttcgatccta ccagatttga aggtaatggt ccagcgcctt atacatttgt accattcggt | 1260 |
| ggaggcccta gaatgtgtcc tggaaaggaa tacgctagat tagaaatctt ggttttcatg | 1320 |
| cataatctgg tcaaacgttt taagtgggaa aaggttattc cagacgaaaa gattattgtc | 1380 |
| gatccattcc caatcccagc taaagatctt ccaatccgtt tgtatcctca caaagcttaa | 1440 |

SEQ ID NO: 114
Medicago truncatula

| | |
|---|---|
| MEPNFYLSLL LLFVTFISLS LFFIFYKQKS PLNLPPGKMG YPIIGESLEF LSTGWKGHPE | 60 |
| KFIFDRMRKY SSELFKTSIV GESTVVCCGA ASNKFLFSNE NKLVTAWWPD SVNKIFPTTS | 120 |
| LDSNLKEESI KMRKLLPQFF KPEALQRYVG VMDVIAQRHF VTHWDNKNEI TVYPLAKRYT | 180 |
| FLLACRLFMS VEDENHVAKF SDPFQLIAAG IISLPIDLPG TPFNKAIKAS NFIRKELIKI | 240 |
| IKQRRVDLAE GTASPTQDIL SHMLLTSDEN GKSMNELNIA DKILGLLIGG HDTASVACTF | 300 |
| LVKYLGELPH IYDKVYQEQM EIAKSKPAGE LLNWDDLKKM KYSWNVACEV MRLSPPLQGG | 360 |
| FREAITDFMF NGFSIPKGWK LYWSANSTHK NAECFPMPEK FDPTRFEGNG PAPYTFVPFG | 420 |
| GGPRMCPGKE YARLEILVFM HNLVKRFKWE KVIPDEKIIV DPFPIPAKDL PIRLYPHKA | 479 |

SEQ ID NO: 115
Artificial Sequence

| | |
|---|---|
| atggcctctg ttactttggg ttcctggatc gtcgtccacc accataacca tcaccatcca | 60 |
| tcatctatcc taactaaatc tcgttcaaga tcctgtccta ttacactaac caaaccaatc | 120 |
| tcttttcgtt caaagagaac agtttcctct agtagttcta tcgtgtcctc tagtgtcgtc | 180 |
| actaaggaag acaatctgag acagtctgaa ccttcttcct ttgatttcat gtcatatatc | 240 |
| attactaagg cagaactagt gaataaggct cttgattcag cagttccatt aagagagcca | 300 |
| ttgaaaatcc atgaagcaat gagatactct cttctagctg gcgggaagag agtcagacct | 360 |
| gtactctgca tagcagcgtg cgaattagtt ggtggcgagg aatcaaccgc tatgcctgcc | 420 |
| gcttgtgctg tagaaatgat tcatacaatg tcactgatac acgatgattt gccatgtatg | 480 |
| gataacgatg atctgagaag gggtaagcca actaaccata aggttttcgg cgaagatgtt | 540 |
| gccgtcttag ctggtgatgc tttgttatct ttcgcgttcg aacatttggc atccgcaaca | 600 |
| tcaagtgatg ttgtgtcacc agtaagagta gttagagcag ttggagaact ggctaaagct | 660 |
| attggaactg agggtttagt tgcaggtcaa gtcgtcgata tctcttccga aggtcttgat | 720 |
| ttgaatgatg taggtcttga acatctcgaa ttcatccatc ttcacaagac agctgcactt | 780 |
| ttagaagcca gtgcggttct cggcgcaatt gttggcggag ggagtgatga cgaaattgag | 840 |
| agattgagga agtttgctag atgtatagga ttactgttcc aagtagtaga cgatatacta | 900 |
| gatgtgacaa agtcttccaa agagttggga aaaacagctg gtaaagattt gattgccgac | 960 |
| aaattgacct accctaagat tatggggcta gaaaaatcaa gagaatttgc cgagaaactc | 1020 |
| aatagagagg cgcgtgatca actgttgggt ttcgattctg ataaagttgc accactctta | 1080 |
| gccttagcca actacatcgc ttacagacaa aactaa | 1116 |

SEQ ID NO: 116
Arabidopsis thaliana

| | |
|---|---|
| MASVTLGSWI VVHHHNHHHP SSILTKSRSR SCPITLTKPI SFRSKRTVSS SSSIVSSSVV | 60 |
| TKEDNLRQSE PSSFDFMSYI ITKAELVNKA LDSAVPLREP LKIHEAMRYS LLAGGKRVRP | 120 |
| VLCIAACELV GGEESTAMPA ACAVEMIHTM SLIHDDLPCM DNDDLRRGKP TNHKVFGEDV | 180 |
| AVLAGDALLS FAFEHLASAT SSDVVSPVRV VRAVGELAKA IGTEGLVAGQ VVDISSEGLD | 240 |
| LNDVGLEHLE FIHLHKTAAL LEASAVLGAI VGGGSDDEIE RLRKFARCIG LLFQVVDDIL | 300 |
| DVTKSSKELG KTAGKDLIAD KLTYPKIMGL EKSREFAEKL NREARDQLLG FDSDKVAPLL | 360 |
| ALANYIAYRQ N | 371 |

SEQ ID NO: 117
Rubus suavissimus

| | |
|---|---|
| MATLLEHFQA MPFAIPIALA ALSWLFLFYI KVSFFSNKSA QAKLPPVPVV PGLPVIGNLL | 60 |
| QLKEKKPYQT FTRWAEEYGP IYSIRTGAST MVVLNTTQVA KEAMVTRYLS ISTRKLSNAL | 120 |
| KILTADKCMV AISDYNDFHK MIKRYILSNV LGPSAQKRHR SNRDTLRANV CSRLHSQVKN | 180 |
| SPREAVNFRR VFEWELFGIA LKQAFGKDIE KPIYVEELGT TLSRDEIFKV LVLDIMEGAI | 240 |
| EVDWRDFFPY LRWIPNTRME TKIQRLYFRR KAVMTALINE QKKRIASGEE INCYIDFLLK | 300 |
| EGKTLTMDQI SMLLWETVIE TADTTMVTTE WAMYEVAKDS KRQDRLYQEI QKVCGSEMVT | 360 |
| EEYLSQLPYL NAVFHETLRK HSPAALVPLR YAHEDTQLGG YYIPAGTEIA INIYGCNMDK | 420 |
| HQWESPEEWK PERFLDPKFD PMDLYKTMAF GAGKRVCAGS LQAMLIACPT IGRLVQEFEW | 480 |
| KLRDGEEENV DTVGLTTHKR YPMHAILKPR S | 511 |

SEQ ID NO: 118
Artificial Sequence

| | |
|---|---|
| MAEQQKIKKS PHVLLIPFPL QGHINPFIQF GKRLISKGVK TTLVTTIHTL NSTLNHSNTT | 60 |
| TTSIEIQAIS DGCDEGGFMS AGESYLETFK QVGSKSLADL IKKLQSEGTT IDAIIYDSMT | 120 |
| EWVLDVAIEF GIDGGSFFTQ ACVVNSLYYH VHKGLISLPL GETVSVPGFP VLQRWETPLI | 180 |
| LQNHEQIQSP WSQMLFGQFA NIDQARWVFT NSFYKLEEEV IEWTRKIWNL KVIGPTLPSM | 240 |
| YLDKRLDDDK DNGFNLYKAN HHECMNWLDD KPKESVVYVA FGSLVEHGPE QVEEITRALI | 300 |
| DSDVNFLWVI KHKEEGKLPE NLSEVIKTGK GLIVAWCKQL DVLAHESVGC FVTHCGFNST | 360 |
| LEAISLGVPV VAMPQFSDQT TNAKLLDEIL GVGVRVKADE NGIVRRGNLA SCIKMIMEEE | 420 |
| RGVIIRKNAV KWKDLAKVAV HEGGSSDNDI VEFVSELIKA | 460 |

SEQ ID NO: 119
Artificial Sequence

| | |
|---|---|
| atggctgaac aacaaaagat caagaagtct ccacacgttt tgttgattcc atttccattg | 60 |
| caaggtcaca tcaacccatt cattcaattc ggtaagagat tgatttccaa gggtgttaag | 120 |
| actactttgg ttactaccat ccataccttg aactctacct tgaaccattc taacactacc | 180 |
| accacctcca ttgaaattca agctatttcc gatggttgtg atgaaggtgg ttttgtttct | 240 |
| gctggtgaat cttacttgga aacctttaag caagttggtt ctaagtcctt ggccgatttg | 300 |
| attaagaagt tgcaatctga aggtactacc attgatgcca ttatctacga ttctatgacc | 360 |
| gaatgggttt tggatgttgc tattgaattc ggtattgatg gtggttcatt cttcactcaa | 420 |
| gcttgtgttg ttaactcctt gtactaccat gttcacaagg gtttgatctc attgccattg | 480 |
| ggtgaaactg tttctgttcc aggtttccca gttttacaaa gatgggaaac tccattgatc | 540 |
| ttgcaaaacc acgaacaaat tcaatctcca tggtcccaaa tgttgtttgg tcaattcgcc | 600 |
| aacattgatc aagctagatg ggtttttacc aactccttct acaagttgga agaagaagtt | 660 |
| atcgaatgga ccagaaagat ctggaacttg aaagttattg gtccaacctt gccatctatg | 720 |
| tacttggata agagattgga tgacgataag gacaacggtt tcaacttgta caaggctaac | 780 |
| catcatgaat gcatgaattg gttggacgac aagccaaaag aatccgttgt ttatgttgct | 840 |
| ttcggttctt tggtcaaaca tggtccagaa caagttgaag aaattaccag agccttgatc | 900 |
| gattccgatg ttaatttctt gtgggtcatc aagcacaaag aagaaggtaa attgccagaa | 960 |
| aacttgtccg aagttatcaa aactggtaag ggtttgattg tcgcttggtg taaacaattg | 1020 |
| gatgttttgg ctcatgaatc cgttggttgt ttcgttactc attgtggttt caactccacc | 1080 |
| ttggaagcta tttctttggg tgttccagtt gttgctatgc cacaattttc tgatcaaact | 1140 |
| accaacgcta agttgttgga cgaaattttg ggtgttggtg ttagagttaa ggctgacgaa | 1200 |
| aatggtatcg ttagaagagg taacttggct tcttgcatca agatgatcat ggaagaagaa | 1260 |
| agaggtgtca tcattagaaa gaacgctgtt aagtggaagg atttggctaa agttgctgtt | 1320 |
| catgaaggtg gtagttccga taatgatatc gttgaattcg tttccgaatt gatcaaggcc | 1380 |
| taa | 1383 |

SEQ ID NO: 120
Artificial Sequence

| | |
|---|---|
| MAEQQKIKKS PHVLLIPFPL QGHINPFIQF GKRLISKGVK TTLVTTIHTL NSTLNHSNTT | 60 |
| TTSIEIQAIS DGCDEGGFVS AGESYLETFK QVGSKSLADL IKKLQSEGTT IDAIIYDSMT | 120 |
| EWVLDVAIEF GIDGGSFFTQ ACVVNSLYYH VHKGLISLPL GETVSVPGFP VLQRWETPLI | 180 |
| LQNHEQIQSP WSQMLFGQFA NIDQARWVFT NSFYKLEEEV IEWTRKIWNL KVIGPTLPSM | 240 |
| YLDKRLDDDK DNGFNLYKAN HHECMNWLDD KPKESVVYVA FGSLVKHGPE QVEEITRALI | 300 |
| DSDVNFLWVI KHKEEGKLPE NLSEVIKTGK GLIVAWCKQL DVLAHESVGC FVTHCGFNST | 360 |
| LEAISLGVPV VAMPQFSDQT TNAKLLDEIL GVGVRVKADE NGIVRRGNLA SCIKMIMEEE | 420 |
| RGVIIRKNAV KWKDLAKVAV HEGGSSDNDI VEFVSELIKA | 460 |

SEQ ID NO: 121
Artificial Sequence

| | |
|---|---|
| atggctgaac aacaaaagat caagaagtct ccacacgttt tgttgattcc atttccattg | 60 |
| caaggtcaca tcaacccatt cattcaattc ggtaagagat tgatttccaa gggtgttaag | 120 |
| actactttgg ttactaccat ccataccttg aactctacct tgaaccattc taacactacc | 180 |
| accacctcca ttgaaattca agctatttcc gatggttgtg atgaaggtgg ttttatgtct | 240 |
| gctggtgaat cttacttgga aacctttaag caagttggtt ctaagtcctt ggccgatttg | 300 |
| attaagaagt tgcaatctga aggtactacc attgatgcca ttatctacga ttctatgacc | 360 |
| gaatgggttt tggatgttgc tattgaattc ggtattgatg gtggttcatt cttcactcaa | 420 |
| gcttgtgttg ttaactcctt gtactaccat gttcacaagg gtttgatctc attgccattg | 480 |
| ggtgaaactg tttctgttcc aggtttccca gttttacaaa gatgggaaac tccattgatc | 540 |
| ttgcaaaacc acgaacaaat tcaatctcca tggtcccaaa tgttgtttgg tcaattcgcc | 600 |
| aacattgatc aagctagatg ggtttttacc aactccttct acaagttgga agaagaagtt | 660 |
| atcgaatgga ccagaaagat ctggaacttg aaagttattg gtccaacctt gccatctatg | 720 |
| tacttggata agagattgga tgacgataag gacaacggtt tcaacttgta caaggctaac | 780 |
| catcatgaat gcatgaattg gttggacgac aagccaaaag aatccgttgt ttatgttgct | 840 |
| ttcggttctt tggtcaaaca tggtccagaa caagttgaag aaattaccag agccttgatc | 900 |
| gattccgatg ttaatttctt gtgggtcatc aagcacaaag aagaaggtaa attgccagaa | 960 |
| aacttgtccg aagttatcaa aactggtaag ggtttgattg tcgcttggtg taaacaattg | 1020 |
| gatgttttgg ctcatgaatc cgttggttgt ttcgttactc attgtggttt caactccacc | 1080 |
| ttggaagcta tttctttggg tgttccagtt gttgctatgc cacaatttca agatcaaact | 1140 |
| accaacgcta agttgttgga cgaaattttg ggtgttggtg ttagagttaa ggctgacgaa | 1200 |
| aatggtatcg ttagaagagg taacttggct tcttgcatca agatgatcat ggaagaagaa | 1260 |
| agaggtgtca tcattagaaa gaacgctgtt aagtggaagg atttggctaa agttgctgtt | 1320 |
| catgaaggtg gtagttccga taatgatatc gttgaattcg tttccgaatt gatcaaggcc | 1380 |
| taa | 1383 |

SEQ ID NO: 122
Artificial Sequence

| | |
|---|---|
| MAEQQKIKKS PHVLLIPFPL QGHINPFIQF GKRLISKGVK TTLVTTIHTL NSTLNHSNTT | 60 |
| TTSIEIQAIS DGCDEGGFMS AGESYLETFK QVGSKSLADL IKKLQSEGTT IDAIIYDSMT | 120 |
| EWVLDVAIEF GIDGGSFFTQ ACVVNSLYYH VHKGLISLPL GETVSVPGFP VLQRWETPLI | 180 |
| LQNHEQIQSP WSQMLFGQFA NIDQARWVFT NSFYKLEEEV IEWTRKIWNL KVIGPTLPSM | 240 |
| YLDKRLDDDK DNGFNLYKAN HHECMNWLDD KPKESVVYVA FGSLVKHGPE QVEEITRALI | 300 |
| DSDVNFLWVI KHKEEGKLPE NLSEVIKTGK GLIVAWCKQL DVLAHESVGC FVTHCGFNST | 360 |
| LEAISLGVPV VAMPQFQDQT TNAKLLDEIL GVGVRVKADE NGIVRRGNLA SCIKMIMEEE | 420 |
| RGVIIRKNAV KWKDLAKVAV HEGGSSDNDI VEFVSELIKA | 460 |

SEQ ID NO: 123
Artificial Sequence

| | |
|---|---|
| atggctgaac aacaaaagat caagaagtct ccacacgttt tgttgattcc atttccattg | 60 |
| caaggtcaca tcaacccatt cattcaattc ggtaagagat tgatttccaa gggtgttaag | 120 |
| actactttgg ttactaccat ccataccttg aactctacct tgaaccattc taacactacc | 180 |
| accacctcca ttgaaattca agctatttcc gatggttgtg atgaaggtgg ttttatgtgt | 240 |
| gctggtgaat cttacttgga aacctttaag caagttggtt ctaagtcctt ggccgatttg | 300 |
| attaagaagt tgcaatctga aggtactacc attgatgcca ttatctacga ttctatgacc | 360 |
| gaatgggttt tggatgttgc tattgaattc ggtattgatg gtggttcatt cttcactcaa | 420 |
| gcttgtgttg ttaactcctt gtactaccat gttcacaagg gtttgatctc attgccattg | 480 |
| ggtgaaactg tttctgttcc aggtttccca gttttacaaa gatgggaaac tccattgatc | 540 |
| ttgcaaaacc acgaacaaat tcaatctcca tggtcccaaa tgttgtttgg tcaattcgcc | 600 |
| aacattgatc aagctagatg ggtttttacc aactccttct acaagttgga agaagaagtt | 660 |
| atcgaatgga ccagaaagat ctggaacttg aaagttattg gtccaacctt gccatctatg | 720 |
| tacttggata agagattgga tgacgataag gacaacggtt tcaacttgta caaggctaac | 780 |
| catcatgaat gcatgaattg gttggacgac aagccaaaag aatccgttgt ttatgttgct | 840 |
| ttcggttctt tggtcaaaca tggtccagaa caagttgaag aaattaccag agccttgatc | 900 |
| gattccgatg ttaatttctt gtgggtcatc aagcacaaag aagaaggtaa attgccagaa | 960 |
| aacttgtccg aagttatcaa aactggtaag ggtttgattg tcgcttggtg taaacaattg | 1020 |
| gatgttttgg ctcatgaatc cgttggttgt ttcgttactc attgtggttt caactccacc | 1080 |
| ttggaagcta tttctttggg tgttccagtt gttgctatgc cacaattttc tgatcaaact | 1140 |
| accaacgcta agttgttgga cgaaattttg ggtgttggtg ttagagttaa ggctgacgaa | 1200 |
| aatggtatcg ttagaagagg taacttggct tcttgcatca agatgatcat ggaagaagaa | 1260 |
| agaggtgtca tcattagaaa gaacgctgtt aagtggaagg atttggctaa agttgctgtt | 1320 |
| catgaaggtg gtagttccga taatgatatc gttgaattcg tttccgaatt gatcaaggcc | 1380 |
| taa | 1383 |

SEQ ID NO: 124
Artificial Sequence

| | |
|---|---|
| MAEQQKIKKS PHVLLIPFPL QGHINPFIQF GKRLISKGVK TTLVTTIHTL NSTLNHSNTT | 60 |
| TTSIEIQAIS DGCDEGGFMC AGESYLETFK QVGSKSLADL IKKLQSEGTT IDAIIYDSMT | 120 |
| EWVLDVAIEF GIDGGSFFTQ ACVVNSLYYH VHKGLISLPL GETVSVPGFP VLQRWETPLI | 180 |
| LQNHEQIQSP WSQMLFGQFA NIDQARWVFT NSFYKLEEEV IEWTRKIWNL KVIGPTLPSM | 240 |
| YLDKRLDDDK DNGFNLYKAN HHECMNWLDD KPKESVVYVA FGSLVKHGPE QVEEITRALI | 300 |
| DSDVNFLWVI KHKEEGKLPE NLSEVIKTGK GLIVAWCKQL DVLAHESVGC FVTHCGFNST | 360 |
| LEAISLGVPV VAMPQFSDQT TNAKLLDEIL GVGVRVKADE NGIVRRGNLA SCIKMIMEEE | 420 |
| RGVIIRKNAV KWKDLAKVAV HEGGSSDNDI VEFVSELIKA | 460 |

SEQ ID NO: 125
Artificial Sequence

| | |
|---|---|
| atggctgaac aacaaaagat caagaagtct ccacacgttt tgttgattcc atttccattg | 60 |
| caaggtcaca tcaacccatt cattcaattc ggtaagagat tgatttccaa gggtgttaag | 120 |
| actactttgg ttactaccat ccataccttg aactctacct tgaaccattc taacactacc | 180 |
| accacctcca ttgaaattca agctatttcc gatggttgtg atgaaggtgg ttttatgtct | 240 |
| gctggtgaat cttacttgga aacctttaag caagttggtt ctaagtcctt ggccgatttg | 300 |
| attaagaagt tgcaatctga aggtactacc attgatgcca ttatctacga ttctatgacc | 360 |
| gaatgggttt tggatgttgc tattgaattc ggtattgatg gtggttcatt cttcactcaa | 420 |
| gcttgtgttg ttaactcctt gtactaccat gttcacaagg gtttgatctc attgccattg | 480 |
| ggtgaaactg tttctgttcc aggtttccca gttttacaaa gatgggaaac tccattgatc | 540 |
| ttgcaaaacc acgaacaaat tcaatctcca tggtcccaaa tgttgtttgg tcaattcgcc | 600 |
| aacattgatc aagctagatg ggtttttacc aactccttct acaagttgga agaagaagtt | 660 |
| atcgaatgga ccagaaagat ctggaacttg aaagttattg gtccaacctt gccatctatg | 720 |
| tacttggata agagattgga tgacgataag gacaacggtt tcaacttgta caaggctacc | 780 |
| catcatgaat gcatgaattg gttggacgac aagccaaaag aatccgttgt ttatgttgct | 840 |
| ttcggttctt tggtctgtca tggtccagaa caagttgaag aaattaccag agccttgatc | 900 |
| gattccgatg ttaatttctt gtgggtcatc aagcacaaag aagaaggtaa attgccagaa | 960 |
| aacttgtccg aagttatcaa aactggtaag ggtttgattg tcgcttggtg taaacaattg | 1020 |
| gatgttttgg ctcatgaatc cgttggttgt ttcgttactc attgtggttt caactccacc | 1080 |
| ttggaagcta tttctttggg tgttccagtt gttgctatgc cacaattttc tgatcaaact | 1140 |
| accaacgcta agttgttgga cgaaattttg ggtgttggtg ttagagttaa ggctgacgaa | 1200 |
| aatggtatcg ttagaagagg taacttggct tcttgcatca agatgatcat ggaagaagaa | 1260 |
| agaggtgtca tcattagaaa gaacgctgtt aagtggaagg atttggctaa agttgctgtt | 1320 |
| catgaaggtg gtagttccga taatgatatc gttgaattcg tttccgaatt gatcaaggcc | 1380 |
| taa | 1383 |

SEQ ID NO: 126
Artificial Sequence

| | |
|---|---|
| MAEQQKIKKS PHVLLIPFPL QGHINPFIQF GKRLISKGVK TTLVTTIHTL NSTLNHSNTT | 60 |
| TTSIEIQAIS DGCDEGGFMS AGESYLETFK QVGSKSLADL IKKLQSEGTT IDAIIYDSMT | 120 |
| EWVLDVAIEF GIDGGSFFTQ ACVVNSLYYH VHKGLISLPL GETVSVPGFP VLQRWETPLI | 180 |
| LQNHEQIQSP WSQMLFGQFA NIDQARWVFT NSFYKLEEEV IEWTRKIWNL KVIGPTLPSM | 240 |
| YLDKRLDDDK DNGFNLYKAT HHECMNWLDD KPKESVVYVA FGSLVCHGPE QVEEITRALI | 300 |
| DSDVNFLWVI KHKEEGKLPE NLSEVIKTGK GLIVAWCKQL DVLAHESVGC FVTHCGFNST | 360 |
| LEAISLGVPV VAMPQFSDQT TNAKLLDEIL GVGVRVKADE NGIVRRGNLA SCIKMIMEEE | 420 |
| RGVIIRKNAV KWKDLAKVAV HEGGSSDNDI VEFVSELIKA | 460 |

SEQ ID NO: 127
Artificial Sequence

| | |
|---|---|
| atggctgaac aacaaaagat caagaagtct ccacacgttt tgttgattcc atttccattg | 60 |
| caaggtcaca tcaacccatt cattcaattc ggtaagagat tgatttccaa gggtgttaag | 120 |
| actactttgg ttactaccat ccataccttg aactctacct tgaaccattc taacactacc | 180 |
| accacctcca ttgaaattca agctatttcc gatggttgtg atgaaggtgg ttttatgtct | 240 |
| gctggtgaat cttacttgga aacctttaag caagttggtt ctaagtcctt ggccgatttg | 300 |
| attaagaagt tgcaatctga aggtactacc attgatgcca ttatctacga ttctatgacc | 360 |
| gaatgggttt tggatgttgc tattgaattc ggtattgatg gtggttcatt cttcactcaa | 420 |
| gcttgtgttg ttaactcctt gtactaccat gttcacaagg gtttgatctc attgccattg | 480 |
| ggtgaaactg tttctgttcc aggtttccca gttttacaaa gatgggaaac tccattgatc | 540 |
| ttgcaaaacg ttgaacaaat tcaatctcca tggtcccaaa tgttgtttgg tcaattcgcc | 600 |
| aacattgatc aagctagatg ggtttttacc aactccttct acaagttgga agaagaagtt | 660 |
| atcgaatgga ccagaaagat ctggaacttg aaagttattg gtccaacctt gccatctatg | 720 |
| tacttggata agagattgga tgacgataag gacaacggtt tcaacttgta caaggctaac | 780 |
| catcatgaat gcatgaattg gttggacgac aagccaaaag aatccgttgt ttatgttgct | 840 |
| ttcggttctt tggtcaaaca tggtccagaa caagttgaag aaattaccag agccttgatc | 900 |
| gattccgatg ttaatttctt gtgggtcatc aagcacaaag aagaaggtaa attgccagaa | 960 |
| aacttgtccg aagttatcaa aactggtaag ggtttgattg tcgcttggtg taaacaattg | 1020 |
| gatgttttgg ctcatgaatc cgttggttgt ttcgttactc attgtggttt caactccacc | 1080 |
| ttggaagcta tttctttggg tgttccagtt gttgctatgc cacaattttc tgatcaaact | 1140 |
| accaacgcta agttgttgga cgaaattttg ggtgttggtg ttagagttaa ggctgacgaa | 1200 |
| aatggtatcg ttagaagagg taacttggct tcttgcatca agatgatcat ggaagaagaa | 1260 |
| agaggtgtca tcattagaaa gaacgctgtt aagtggaagg atttggctaa agttgctgtt | 1320 |
| catgaaggtg gtagttccga taatgatatc gttgaattcg tttccgaatt gatcaaggcc | 1380 |
| taa | 1383 |

SEQ ID NO: 128
Artificial Sequence

| | |
|---|---|
| MAEQQKIKKS PHVLLIPFPL QGHINPFIQF GKRLISKGVK TTLVTTIHTL NSTLNHSNTT | 60 |
| TTSIEIQAIS DGCDEGGFMS AGESYLETFK QVGSKSLADL IKKLQSEGTT IDAIIYDSMT | 120 |
| EWVLDVAIEF GIDGGSFFTQ ACVVNSLYYH VHKGLISLPL GETVSVPGFP VLQRWETPLI | 180 |
| LQNVEQIQSP WSQMLFGQFA NIDQARWVFT NSFYKLEEEV IEWTRKIWNL KVIGPTLPSM | 240 |
| YLDKRLDDDK DNGFNLYKAN HHECMNWLDD KPKESVVYVA FGSLVKHGPE QVEEITRALI | 300 |
| DSDVNFLWVI KHKEEGKLPE NLSEVIKTGK GLIVAWCKQL DVLAHESVGC FVTHCGFNST | 360 |
| LEAISLGVPV VAMPQFSDQT TNAKLLDEIL GVGVRVKADE NGIVRRGNLA SCIKMIMEEE | 420 |
| RGVIIRKNAV KWKDLAKVAV HEGGSSDNDI VEFVSELIKA | 460 |

SEQ ID NO: 129
Artificial Sequence

| | |
|---|---|
| atggctgaac aacaaaagat caagaagtct ccacacgttt tgttgattcc atttccattg | 60 |
| caaggtcaca tcaacccatt cattcaattc ggtaagagat tgatttccaa gggtgttaag | 120 |
| actactttgg ttactaccat ccataccttg aactctacct tgaaccattc taacactacc | 180 |
| accacctcca ttgaaattca agctatttcc gatggttgtg atgaaggtgg ttttatgtct | 240 |
| tggggtaaat cttacttgga aacctttaag caagttggtt ctaagtcctt ggccgatttg | 300 |
| attaagaagt tgcaatctga aggtactacc attgatgcca ttatctacga ttctatgacc | 360 |
| gaatgggttt tggatgttgc tattgaattc ggtattgatg gtggttcatt cttcactcaa | 420 |
| gcttgtgttg ttaactcctt gtactaccat gttcacaagg gtttgatctc attgccattg | 480 |
| ggtgaaactg tttctgttcc aggtttccca gttttacaaa gatgggaaac tccattgatc | 540 |
| ttgcaaaacc acgaacaaat tcaatctcca tggtcccaaa tgttgtttgg tcaattcgcc | 600 |
| aacattgatc aagctagatg ggtttttacc aactccttct acaagttgga agaagaagtt | 660 |
| atcgaatgga ccagaaagat ctggaacttg aaagttattg gtccaacctt gccatctatg | 720 |
| tacttggata agagattgga tgacgataag gacaacggtt tcaacttgta caaggctaac | 780 |
| catcatgaat gcatgaattg gttggacgac aagccaaaag aatccgttgt ttatgttgct | 840 |
| ttcggttctt tggtcaaaca tggtccagaa caagttgaag aaattaccag agccttgatc | 900 |
| gattccgatg ttaatttctt gtgggtcatc aagcacaaag aagaaggtaa attgccagaa | 960 |
| aacttgtccg aagttatcaa aactggtaag ggtttgattg tcgcttggtg taaacaattg | 1020 |
| gatgttttgg ctcatgaatc cgttggttgt ttcgttactc attgtggttt caactccacc | 1080 |
| ttggaagcta tttctttggg tgttccagtt gttgctatgc cacaattttc tgatcaaact | 1140 |
| accaacgcta agttgttgga cgaaattttg ggtgttggtg ttagagttaa ggctgacgaa | 1200 |
| aatggtatcg ttagaagagg taacttggct tcttgcatca agatgatcat ggaagaagaa | 1260 |
| agaggtgtca tcattagaaa gaacgctgtt aagtggaagg atttggctaa agttgctgtt | 1320 |
| catgaaggtg gtagttccga taatgatatc gttgaattcg tttccgaatt gatcaaggcc | 1380 |
| taa | 1383 |

SEQ ID NO: 130
Artificial Sequence

| | |
|---|---|
| MAEQQKIKKS PHVLLIPFPL QGHINPFIQF GKRLISKGVK TTLVTTIHTL NSTLNHSNTT | 60 |
| TTSIEIQAIS DGCDEGGFMS WGKSYLETFK QVGSKSLADL IKKLQSEGTT IDAIIYDSMT | 120 |
| EWVLDVAIEF GIDGGSFFTQ ACVVNSLYYH VHKGLISLPL GETVSVPGFP VLQRWETPLI | 180 |
| LQNHEQIQSP WSQMLFGQFA NIDQARWVFT NSFYKLEEEV IEWTRKIWNL KVIGPTLPSM | 240 |
| YLDKRLDDDK DNGFNLYKAN HHECMNWLDD KPKESVVYVA FGSLVKHGPE QVEEITRALI | 300 |
| DSDVNFLWVI KHKEEGKLPE NLSEVIKTGK GLIVAWCKQL DVLAHESVGC FVTHCGFNST | 360 |
| LEAISLGVPV VAMPQFSDQT TNAKLLDEIL GVGVRVKADE NGIVRRGNLA SCIKMIMEEE | 420 |
| RGVIIRKNAV KWKDLAKVAV HEGGSSDNDI VEFVSELIKA | 460 |

SEQ ID NO: 131
Artificial Sequence

| | |
|---|---|
| atggatgcta tggctaccac cgaaaaaaag ccacatgtta ttttcattcc attcccagct | 60 |
| caatcccata ttaaggctat gttgaagttg gcccaattat tgcatcacaa gggtttacaa | 120 |
| atcaccttcg ttaacaccga cttcatccac aatcaattct tggaatcttc tggtccacat | 180 |
| tgcttggatg gtgctccagg ttttagattt gaaactattc cagatggtgt ttcccattct | 240 |
| ccagaagctt ctattccaat tagagaatcc ttgttgagat ccatcgaaac taatttcttg | 300 |
| gacagattca tcgacttggt tactaagttg ccagatccac caacctgtat tatttctgat | 360 |
| ggtttcttgt ccgttttcac cattgatgct gctaagaaat tgggtatccc agttatgatg | 420 |
| tactggactt tggctgcttg tggttttatg ggtttctacc atatccattc cttgatcgaa | 480 |
| aagggttttg ctccattgaa agatgcctct tacttgacta acggttactt ggataccgtt | 540 |
| attgattggg ttccaggtat ggaaggtatc agattgaagg attttccatt ggattggtcc | 600 |
| actgatttga acgataaggt tttgatgttc actaccgaag ctccacaaag atctcataag | 660 |
| gtttcccatc atatcttcca caccttcgat gaattggaac catccattat taagaccttg | 720 |
| tccttgagat acaaccacat ctataccatt ggtccattgc aattattatt ggaccaaatc | 780 |
| ccagaagaaa agaagcaaac tggtattact tccttgcacg gttactcatt ggtcaaagaa | 840 |
| gaaccagaat gcttccaatg gttgcaatct aaagaaccta actccgttgt ctacgttaac | 900 |
| tttggttcta ctaccgttat gtccttggaa gatatgactg aatttggttg gggtttggct | 960 |
| aactctaacc attacttctt gtggatcatc agatccaact tggttattgg tgaaaacgct | 1020 |
| gttttgccac cagaattgga agaacatatc aagaagagag gtttcattgc ttcttggtgt | 1080 |
| tcccaagaaa aggttttgaa acatccatct gtcggtggtt tcttgactca ttgtggttgg | 1140 |
| ggttctacca ttgaatcttt gtctgctggt gttccaatga tttgttggcc atattcttgg | 1200 |
| gatcaattga ccaactgcag atacatctgc aaagaatggg aagtcggttt ggaaatgggt | 1260 |
| acaaaagtca aaagagatga agtcaagaga ttggtccaag aattgatggg tgaaggtggt | 1320 |
| cataagatga gaaacaaagc caaggactgg aaagaaaagg ctagaattgc tattgctcca | 1380 |
| aacggttctt cctctttgaa cattgacaag atggtcaaag aaatcaccgt tttggccaga | 1440 |
| aacagagcct cctccaccaa actagtaaaa atggctgaac aacaaaagat caagaagtct | 1500 |
| ccacacgttt tgttgattcc atttccattg caaggtcaca tcaacccatt cattcaattc | 1560 |
| ggtaagagat tgatttccaa gggtgttaag actactttgg ttactaccat ccataccttg | 1620 |
| aactctacct tgaaccattc taacactacc accacctcca ttgaaattca agctatttcc | 1680 |
| gatggttgtg atgaaggtgg ttttatgtct gctggtgaat cttacttgga aacctttaag | 1740 |
| caagttggtt ctaagtcctt ggccgatttg attaagaagt tgcaatctga aggtactacc | 1800 |
| attgatgcca ttatctacga ttctatgacc gaatgggttt tggatgttgc tattgaattc | 1860 |
| ggtattgatg gtggttcatt cttcactcaa gcttgtgttg ttaactcctt gtactaccat | 1920 |
| gttcacaagg gtttgatctc attgccattg ggtgaaactg tttctgttcc aggtttccca | 1980 |
| gttttacaaa gatgggaaac tccattgatc ttgcaaaacc acgaacaaat tcaatctcca | 2040 |
| tggtcccaaa tgttgtttgg tcaattcgcc aacattgatc aagctagatg ggtttttacc | 2100 |
| aactccttct acaagttgga agaagaagtt atcgaatgga ccagaaagat ctggaacttg | 2160 |
| aaagttattg gtccaacctt gccatctatg tacttggata agagattgga tgacgataag | 2220 |
| gacaacggtt tcaacttgta caaggctaac catcatgaat gcatgaattg gttggacgac | 2280 |
| aagccaaaag aatccgttgt ttatgttgct ttcggttctt tggtcaaaca tggtccagaa | 2340 |
| caagttgaag aaattaccag agccttgatc gattccgatg ttaatttctt gtgggtcatc | 2400 |
| aagcacaaag aagaaggtaa attgccagaa aacttgtccg aagttatcaa aactggtaag | 2460 |
| ggtttgattg tcgcttggtg taaacaattg gatgttttgg ctcatgaatc cgttggttgt | 2520 |
| ttcgttactc attgtggttt caactccacc ttggaagcta tttctttggg tgttccagtt | 2580 |
| gttgctatgc cacaattttc tgatcaaact accaacgcta agttgttgga cgaaattttg | 2640 |
| ggtgttggtg ttagagttaa ggctgacgaa aatggtatcg ttagaagagg taacttggct | 2700 |
| tcttgcatca agatgatcat ggaagaagaa agaggtgtca tcattagaaa gaacgctgtt | 2760 |
| aagtggaagg atttggctaa agttgctgtt catgaaggtg gtagttccga taatgatatc | 2820 |
| gttgaattcg tttccgaatt gatcaaggcc taa | 2853 |

SEQ ID NO: 132
Artificial Sequence

| | |
|---|---|
| MDAMATTEKK PHVIFIPFPA QSHIKAMLKL AQLLHHKGLQ ITFVNTDFIH NQFLESSGPH | 60 |
| CLDGAPGFRF ETIPDGVSHS PEASIPIRES LLRSIETNFL DRFIDLVTKL PDPPTCIISD | 120 |
| GFLSVFTIDA AKKLGIPVMM YWTLAACGFM GFYHIHSLIE KGFAPLKDAS YLTNGYLDTV | 180 |
| IDWVPGMEGI RLKDFPLDWS TDLNDKVLMF TTEAPQRSHK VSHHIFHTFD ELEPSIIKTL | 240 |
| SLRYNHIYTI GPLQLLLDQI PEEKKQTGIT SLHGYSLVKE EPECFQWLQS KEPNSVVYVN | 300 |
| FGSTTVMSLE DMTEFGWGLA NSNHYFLWII RSNLVIGENA VLPPELEEHI KKRGFIASWC | 360 |
| SQEKVLKHPS VGGFLTHCGW GSTIESLSAG VPMICWPYSW DQLTNCRYIC KEWEVGLEMG | 420 |
| TKVKRDEVKR LVQELMGEGG HKMRNKAKDW KEKARIAIAP NGSSSLNIDK MVKEITVLAR | 480 |
| NRASSTKLVK MAEQQKIKKS PHVLLIPFPL QGHINPFIQF GKRLISKGVK TTLVTTIHTL | 540 |
| NSTLNHSNTT TTSIEIQAIS DGCDEGGFMS AGESYLETFK QVGSKSLADL IKKLQSEGTT | 600 |
| IDAIIYDSMT EWVLDVAIEF GIDGGSFFTQ ACVVNSLYYH VHKGLISLPL GETVSVPGFP | 660 |
| VLQRWETPLI LQNHEQIQSP WSQMLFGQFA NIDQARWVFT NSFYKLEEEV IEWTRKIWNL | 720 |
| KVIGPTLPSM YLDKRLDDDK DNGFNLYKAN HHECMNWLDD KPKESVVYVA FGSLVKHGPE | 780 |
| QVEEITRALI DSDVNFLWVI KHKEEGKLPE NLSEVIKTGK GLIVAWCKQL DVLAHESVGC | 840 |
| FVTHCGFNST LEAISLGVPV VAMPQFSDQT TNAKLLDEIL GVGVRVKADE NGIVRRGNLA | 900 |
| SCIKMIMEEE RGVIIRKNAV KWKDLAKVAV HEGGSSDNDI VEFVSELIKA | 950 |

SEQ ID NO: 133
Artificial Sequence

| | |
|---|---|
| atggctgaac aacaaaagat caagaagtct ccacacgttt tgttgattcc atttccattg | 60 |
| caaggtcaca tcaacccatt cattcaattc ggtaagagat tgatttccaa gggtgttaag | 120 |
| actactttgg ttactaccat ccataccttg aactctacct tgaaccattc taacactacc | 180 |
| accacctcca ttgaaattca agctatttcc gatggttgtg atgaaggtgg ttttatgtct | 240 |
| gctggtgaat cttacttgga aacctttaag caagttggtt ctaagtcctt ggccgatttg | 300 |
| attaagaagt tgcaatctga aggtactacc attgatgcca ttatctacga ttctatgacc | 360 |
| gaatgggttt tggatgttgc tattgaattc ggtattgatg gtggttcatt cttcactcaa | 420 |
| gcttgtgttg ttaactcctt gtactaccat gttcacaagg gtttgatctc attgccattg | 480 |
| ggtgaaactg tttctgttcc aggtttccca gttttacaaa gatgggaaac tccattgatc | 540 |
| ttgcaaaacc acgaacaaat tcaatctcca tggtcccaaa tgttgtttgg tcaattcgcc | 600 |
| aacattgatc aagctagatg ggtttttacc aactccttct acaagttgga agaagaagtt | 660 |
| atcgaatgga ccagaaagat ctggaacttg aaagttattg gtccaacctt gccatctatg | 720 |
| tacttggata agagattgga tgacgataag gacaacggtt tcaacttgta caaggctaac | 780 |
| catcatgaat gcatgaattg gttggacgac aagccaaaag aatccgttgt ttatgttgct | 840 |
| ttcggttctt tggtcaaaca tggtccagaa caagttgaag aaattaccag agccttgatc | 900 |
| gattccgatg ttaatttctt gtgggtcatc aagcacaaag aagaaggtaa attgccagaa | 960 |
| aacttgtccg aagttatcaa aactggtaag ggtttgattg tcgcttggtg taaacaattg | 1020 |
| gatgttttgg ctcatgaatc cgttggttgt ttcgttactc attgtggttt caactccacc | 1080 |
| ttggaagcta tttctttggg tgttccagtt gttgctatgc cacaattttc tgatcaaact | 1140 |
| accaacgcta agttgttgga cgaaattttg ggtgttggtg ttagagttaa ggctgacgaa | 1200 |
| aatggtatcg ttagaagagg taacttggct tcttgcatca agatgatcat ggaagaagaa | 1260 |
| agaggtgtca tcattagaaa gaacgctgtt aagtggaagg atttggctaa agttgctgtt | 1320 |
| catgaaggtg gtagttccga taatgatatc gttgaattcg tttccgaatt gatcaaggcc | 1380 |
| agagcctcct ccaccaaact agtaaaaatg gatgctatgg ctaccaccga aaaaaagcca | 1440 |
| catgttattt tcattccatt cccagctcaa tcccatatta aggctatgtt gaagttggcc | 1500 |
| caattattgc atcacaaggg tttacaaatc accttcgtta acaccgactt catccacaat | 1560 |
| caattcttgg aatcttctgg tccacattgc ttggatggtg ctccaggttt tagatttgaa | 1620 |
| actattccag atggtgtttc ccattctcca gaagcttcta ttccaattag agaatccttg | 1680 |
| ttgagatcca tcgaaactaa tttcttggac agattcatcg acttggttac taagttgcca | 1740 |
| gatccaccaa cctgtattat ttctgatggt ttcttgtccg ttttcaccat tgatgctgct | 1800 |
| aagaaattgg gtatcccagt tatgatgtac tggactttgg ctgcttgtgg ttttatgggt | 1860 |
| ttctaccata tccattcctt gatcgaaaag ggttttgctc cattgaaaga tgcctcttac | 1920 |
| ttgactaacg gttacttgga taccgttatt gattgggttc caggtatgga aggtatcaga | 1980 |
| ttgaaggatt ttccattgga ttggtccact gatttgaacg ataaggtttt gatgttcact | 2040 |
| accgaagctc cacaaagatc tcataaggtt tcccatcata tcttccacac cttcgatgaa | 2100 |
| ttggaaccat ccattattaa gaccttgtcc ttgagataca accacatcta taccattggt | 2160 |
| ccattgcaat tattattgga ccaaatccca gaagaaaaga agcaaactgg tattacttcc | 2220 |
| ttgcacggtt actcattggt caaagaagaa ccagaatgct tccaatggtt gcaatctaaa | 2280 |
| gaacctaact ccgttgtcta cgttaacttt ggttctacta ccgttatgtc cttggaagat | 2340 |
| atgactgaat ttggttgggg tttggctaac tctaaccatt acttcttgtg gatcatcaga | 2400 |
| tccaacttgg ttattggtga aaacgctgtt ttgccaccag aattggaaga acatatcaag | 2460 |
| aagagaggtt tcattgcttc ttggtgttcc caagaaaagg ttttgaaaca tccatctgtc | 2520 |
| ggtggtttct tgactcattg tggttggggt tctaccattg aatctttgtc tgctggtgtt | 2580 |
| ccaatgattt gttggccata ttcttgggat caattgacca actgcagata catctgcaaa | 2640 |
| gaatgggaag tcggtttgga aatgggtaca aaagtcaaaa gagatgaagt caagagattg | 2700 |
| gtccaagaat tgatgggtga aggtggtcat aagatgagaa acaaagccaa ggactggaaa | 2760 |
| gaaaaggcta gaattgctat tgctccaaac ggttcttcct ctttgaacat tgacaagatg | 2820 |
| gtcaaagaaa tcaccgtttt ggccagaaac gtcgacctcg agtcatgtaa ttag | 2874 |

SEQ ID NO: 134
Artificial Sequence

| | |
|---|---|
| MAEQQKIKKS PHVLLIPFPL QGHINPFIQF GKRLISKGVK TTLVTTIHTL NSTLNHSNTT | 60 |
| TTSIEIQAIS DGCDEGGFMS AGESYLETFK QVGSKSLADL IKKLQSEGTT IDAIIYDSMT | 120 |
| EWVLDVAIEF GIDGGSFFTQ ACVVNSLYYH VHKGLISLPL GETVSVPGFP VLQRWETPLI | 180 |
| LQNHEQIQSP WSQMLFGQFA NIDQARWVFT NSFYKLEEEV IEWTRKIWNL KVIGPTLPSM | 240 |
| YLDKRLDDDK DNGFNLYKAN HHECMNWLDD KPKESVVYVA FGSLVKHGPE QVEEITRALI | 300 |
| DSDVNFLWVI KHKEEGKLPE NLSEVIKTGK GLIVAWCKQL DVLAHESVGC FVTHCGFNST | 360 |
| LEAISLGVPV VAMPQFSDQT TNAKLLDEIL GVGVRVKADE NGIVRRGNLA SCIKMIMEEE | 420 |
| RGVIIRKNAV KWKDLAKVAV HEGGSSDNDI VEFVSELIKA RASSTKLVKM DAMATTEKKP | 480 |
| HVIFIPFPAQ SHIKAMLKLA QLLHHKGLQI TFVNTDFIHN QFLESSGPHC LDGAPGFRFE | 540 |
| TIPDGVSHSP EASIPIRESL LRSIETNFLD RFIDLVTKLP DPPTCIISDG FLSVFTIDAA | 600 |
| KKLGIPVMMY WTLAACGFMG FYHIHSLIEK GFAPLKDASY LTNGYLDTVI DWVPGMEGIR | 660 |
| LKDFPLDWST DLNDKVLMFT TEAPQRSHKV SHHIFHTFDE LEPSIIKTLS LRYNHIYTIG | 720 |
| PLQLLLDQIP EEKKQTGITS LHGYSLVKEE PECFQWLQSK EPNSVVYVNF GSTTVMSLED | 780 |
| MTEFGWGLAN SNHYFLWIIR SNLVIGENAV LPPELEEHIK KRGFIASWCS QEKVLKHPSV | 840 |
| GGFLTHCGWG STIESLSAGV PMICWPYSWD QLTNCRYICK EWEVGLEMGT KVKRDEVKRL | 900 |
| VQELMGEGGH KMRNKAKDWK EKARIAIAPN GSSSLNIDKM VKEITVLARN VDLESCN | 957 |

SEQ ID NO: 135
Artificial Sequence

| | |
|---|---|
| atggctgaac aacaaaagat caagaagtct ccacacgttt tgttgattcc atttccattg | 60 |
| caaggtcaca tcaacccatt cattcaattc ggtaagagat tgatttccaa gggtgttaag | 120 |
| actactttgg ttactaccat ccataccttg aactctacct tgaaccattc taacactacc | 180 |
| accacctcca ttgaaattca agctatttcc gatggttgtg atgaaggtgg ttttatgtct | 240 |
| gctggtgaat cttacttgga aacctttaag caagttggtt ctaagtcctt ggccgatttg | 300 |
| attaagaagt tgcaatctga aggtactacc attgatgcca ttatctacga ttctatgacc | 360 |
| gaatgggttt tggatgttgc tattgaattc ggtattgatg gtggttcatt cttcactcaa | 420 |
| gcttgtgttg ttaactcctt gtactaccat gttcacaagg gtttgatctc attgccattg | 480 |
| ggtgaaactg tttctgttcc aggtttccca gttttacaaa gatgggaaac tccattgatc | 540 |
| ttgcaaaacc acgaacaaat tcaatctcca tggtcccaaa tgttgtttgg tcaattcgcc | 600 |
| aacattgatc aagctagatg ggtttttacc aactccttct acaagttgga agaagaagtt | 660 |
| atcgaatgga ccagaaagat ctggaacttg aaagttattg gtccaacctt gccatctatg | 720 |
| tacttggata agagattgga tgacgataag gacaacggtt tcaacttgta caaggctaac | 780 |
| catcatgaat gcatgaattg gttggacgac aagccaaaag aatccgttgt ttatgttgct | 840 |
| ttcggttctt tggtcaaaca tggtccagaa caagttgaag aaattaccag agccttgatc | 900 |
| gattccgatg ttaatttctt gtgggtcatc aagcacaaag aagaaggtaa attgccagaa | 960 |
| aacttgtccg aagttatcaa aactggtaag ggtttgattg tcgcttggtg taaacaattg | 1020 |
| gatgttttgg ctcatgaatc cgttggttgt ttcgttactc attgtggttt caactccacc | 1080 |
| ttggaagcta tttctttggg tgttccagtt gttgctatgc cacaattttc tgatcaaact | 1140 |
| accaacgcta agttgttgga cgaaattttg ggtgttggtg ttagagttaa ggctgacgaa | 1200 |
| aatggtatcg ttagaagagg taacttggct tcttgcatca agatgatcat ggaagaagaa | 1260 |
| agaggtgtca tcattagaaa gaacgctgtt aagtggaagg atttggctaa agttgctgtt | 1320 |
| catgaaggtg gtagttccga taatgatatc gttgaattcg tttccgaatt gatcaaggcc | 1380 |
| aaactagtaa aaatggatgc tatggctacc accgaaaaaa agccacatgt tattttcatt | 1440 |
| ccattcccag ctcaatccca tattaaggct atgttgaagt tggcccaatt attgcatcac | 1500 |
| aagggtttac aaatcacctt cgttaacacc gacttcatcc acaatcaatt cttggaatct | 1560 |
| tctggtccac attgcttgga tggtgctcca ggttttagat ttgaaactat tccagatggt | 1620 |
| gtttcccatt ctccagaagc ttctattcca attagagaat ccttgttgag atccatcgaa | 1680 |
| actaatttct tggacagatt catcgacttg gttactaagt tgccagatcc accaacctgt | 1740 |
| attatttctg atggtttctt gtccgttttc accattgatg ctgctaagaa attgggtatc | 1800 |
| ccagttatga tgtactggac tttggctgct tgtggtttta tgggtttcta ccatatccat | 1860 |
| tccttgatcg aaaagggttt tgctccattg aaagatgcct cttacttgac taacggttac | 1920 |
| ttggataccg ttattgattg ggttccaggt atggaaggta tcagattgaa ggattttcca | 1980 |
| ttggattggt ccactgattt gaacgataag gttttgatgt tcactaccga agctccacaa | 2040 |
| agatctcata aggtttccca tcatatcttc cacaccttcg atgaattgga accatccatt | 2100 |
| attaagacct tgtccttgag atacaaccac atctatacca ttggtccatt gcaattatta | 2160 |
| ttggaccaaa tcccagaaga aaagaagcaa actggtatta cttccttgca cggttactca | 2220 |
| ttggtcaaag aagaaccaga atgcttccaa tggttgcaat ctaaagaacc taactccgtt | 2280 |
| gtctacgtta actttggttc tactaccgtt atgtccttgg aagatatgac tgaatttggt | 2340 |
| tggggtttgg ctaactctaa ccattacttc ttgtggatca tcagatccaa cttggttatt | 2400 |
| ggtgaaaacg ctgttttgcc accagaattg gaagaacata tcaagaagag aggtttcatt | 2460 |
| gcttcttggt gttcccaaga aaaggttttg aaacatccat ctgtcggtgg tttcttgact | 2520 |
| cattgtggtt ggggttctac cattgaatct ttgtctgctg gtgttccaat gatttgttgg | 2580 |
| ccatattctt gggatcaatt gaccaactgc agatacatct gcaaagaatg ggaagtcggt | 2640 |
| ttggaaatgg gtacaaaagt caaaagagat gaagtcaaga gattggtcca agaattgatg | 2700 |
| ggtgaaggtg gtcataagat gagaaacaaa gccaaggact ggaaagaaaa ggctagaatt | 2760 |
| gctattgctc caaacggttc ttcctctttg aacattgaca agatggtcaa agaaatcacc | 2820 |
| gttttggcca gaaacgtcga cctcgagtca tgtaattag | 2859 |

SEQ ID NO: 136
Artificial Sequence

| | |
|---|---|
| MAEQQKIKKS PHVLLIPFPL QGHINPFIQF GKRLISKGVK TTLVTTIHTL NSTLNHSNTT | 60 |
| TTSIEIQAIS DGCDEGGFMS AGESYLETFK QVGSKSLADL IKKLQSEGTT IDAIIYDSMT | 120 |
| EWVLDVAIEF GIDGGSFFTQ ACVVNSLYYH VHKGLISLPL GETVSVPGFP VLQRWETPLI | 180 |
| LQNHEQIQSP WSQMLFGQFA NIDQARWVFT NSFYKLEEEV IEWTRKIWNL KVIGPTLPSM | 240 |
| YLDKRLDDDK DNGFNLYKAN HHECMNWLDD KPKESVVYVA FGSLVKHGPE QVEEITRALI | 300 |
| DSDVNFLWVI KHKEEGKLPE NLSEVIKTGK GLIVAWCKQL DVLAHESVGC FVTHCGFNST | 360 |
| LEAISLGVPV VAMPQFSDQT TNAKLLDEIL GVGVRVKADE NGIVRRGNLA SCIKMIMEEE | 420 |
| RGVIIRKNAV KWKDLAKVAV HEGGSSDNDI VEFVSELIKA KLVKMDAMAT TEKKPHVIFI | 480 |
| PFPAQSHIKA MLKLAQLLHH KGLQITFVNT DFIHNQFLES SGPHCLDGAP GFRFETIPDG | 540 |
| VSHSPEASIP IRESLLRSIE TNFLDRFIDL VTKLPDPPTC IISDGFLSVF TIDAAKKLGI | 600 |
| PVMMYWTLAA CGFMGFYHIH SLIEKGFAPL KDASYLTNGY LDTVIDWVPG MEGIRLKDFP | 660 |
| LDWSTDLNDK VLMFTTEAPQ RSHKVSHHIF HTFDELEPSI IKTLSLRYNH IYTIGPLQLL | 720 |
| LDQIPEEKKQ TGITSLHGYS LVKEEPECFQ WLQSKEPNSV VYVNFGSTTV MSLEDMTEFG | 780 |
| WGLANSNHYF LWIIRSNLVI GENAVLPPEL EEHIKKRGFI ASWCSQEKVL KHPSVGGFLT | 840 |
| HCGWGSTIES LSAGVPMICW PYSWDQLTNC RYICKEWEVG LEMGTKVKRD EVKRLVQELM | 900 |
| GEGGHKMRNK AKDWKEKARI AIAPNGSSSL NIDKMVKEIT VLARNVDLES CN | 952 |

SEQ ID NO: 137
Artificial Sequence

| | |
|---|---|
| atggatgcta tggctaccac cgaaaaaaag ccacatgtta ttttcattcc attcccagct | 60 |
| caatcccata ttaaggctat gttgaagttg gcccaattat tgcatcacaa gggtttacaa | 120 |
| atcaccttcg ttaacaccga cttcatccac aatcaattct tggaatcttc tggtccacat | 180 |
| tgcttggatg gtgctccagg ttttagattt gaaactattc cagatggtgt ttcccattct | 240 |
| ccagaagctt ctattccaat tagagaatcc ttgttgagat ccatcgaaac taatttcttg | 300 |
| gacagattca tcgacttggt tactaagttg ccagatccac caacctgtat tatttctgat | 360 |
| ggtttcttgt ccgttttcac cattgatgct gctaagaaat tgggtatccc agttatgatg | 420 |
| tactggactt tggctgcttg tggttttatg ggtttctacc atatccattc cttgatcgaa | 480 |
| aagggttttg ctccattgaa agatgcctct tacttgacta acggttactt ggataccgtt | 540 |
| attgattggg ttccaggtat ggaaggtatc agattgaagg attttccatt ggattggtcc | 600 |
| actgatttga acgataaggt tttgatgttc actaccgaag ctccacaaag atctcataag | 660 |
| gtttcccatc atatcttcca caccttcgat gaattggaac catccattat taagaccttg | 720 |
| tccttgagat acaaccacat ctataccatt ggtccattgc aattattatt ggaccaaatc | 780 |
| ccagaagaaa agaagcaaac tggtattact tccttgcacg gttactcatt ggtcaaagaa | 840 |
| gaaccagaat gcttccaatg gttgcaatct aaagaaccta actccgttgt ctacgttaac | 900 |
| tttggttcta ctaccgttat gtccttggaa gatatgactg aatttggttg gggtttggct | 960 |
| aactctaacc attacttctt gtggatcatc agatccaact tggttattgg tgaaaacgct | 1020 |
| gttttgccac cagaattgga agaacatatc aagaagagag gtttcattgc ttcttggtgt | 1080 |
| tcccaagaaa aggttttgaa acatccatct gtcggtggtt tcttgactca ttgtggttgg | 1140 |
| ggttctacca ttgaatcttt gtctgctggt gttccaatga tttgttggcc atattcttgg | 1200 |
| gatcaattga ccaactgcag atacatctgc aaagaatggg aagtcggttt ggaaatgggt | 1260 |
| acaaaagtca aaagagatga agtcaagaga ttggtccaag aattgatggg tgaaggtggt | 1320 |
| cataagatga gaaacaaagc caaggactgg aaagaaaagg ctagaattgc tattgctcca | 1380 |
| aacggttctt cctctttgaa cattgacaag atggtcaaag aaatcaccgt tttggccaga | 1440 |
| aacggtggag gaggctctgg tggaggcggt agcggaggcg gagggtcgat ggctgaacaa | 1500 |
| caaaagatca agaagtctcc acacgttttg ttgattccat ttccattgca aggtcacatc | 1560 |
| aacccattca ttcaattcgg taagagattg atttccaagg gtgttaagac tactttggtt | 1620 |
| actaccatcc ataccttgaa ctctaccttg aaccattcta acactaccac cacctccatt | 1680 |
| gaaattcaag ctatttccga tggttgtgat gaaggtggtt ttatgtctgc tggtgaatct | 1740 |
| tacttggaaa cctttaagca agttggttct aagtccttgg ccgatttgat taagaagttg | 1800 |
| caatctgaag gtactaccat tgatgccatt atctacgatt ctatgaccga atgggttttg | 1860 |
| gatgttgcta ttgaattcgg tattgatggt ggttcattct tcactcaagc ttgtgttgtt | 1920 |
| aactccttgt actaccatgt tcacaagggt ttgatctcat tgccattggg tgaaactgtt | 1980 |
| tctgttccag gtttcccagt tttacaaaga tgggaaactc cattgatctt gcaaaaccac | 2040 |
| gaacaaattc aatctccatg gtcccaaatg ttgtttggtc aattcgccaa cattgatcaa | 2100 |
| gctagatggg tttttaccaa ctccttctac aagttggaag aagaagttat cgaatggacc | 2160 |
| agaaagatct ggaacttgaa agttattggt ccaaccttgc catctatgta cttggataag | 2220 |
| agattggatg acgataagga caacggtttc aacttgtaca aggctaacca tcatgaatgc | 2280 |
| atgaattggt tggacgacaa gccaaaagaa tccgttgttt atgttgcttt cggttctttg | 2340 |
| gtcaaacatg gtccagaaca agttgaagaa attaccagag ccttgatcga ttccgatgtt | 2400 |
| aatttcttgt gggtcatcaa gcacaaagaa gaaggtaaat tgccagaaaa cttgtccgaa | 2460 |
| gttatcaaaa ctggtaaggg tttgattgtc gcttggtgta aacaattgga tgttttggct | 2520 |
| catgaatccg ttggttgttt cgttactcat tgtggtttca actccacctt ggaagctatt | 2580 |
| tctttgggtg ttccagttgt tgctatgcca caattttctg atcaaactac caacgctaag | 2640 |
| ttgttggacg aaattttggg tgttggtgtt agagttaagg ctgacgaaaa tggtatcgtt | 2700 |
| agaagaggta acttggcttc ttgcatcaag atgatcatgg aagaagaaag aggtgtcatc | 2760 |
| attagaaaga acgctgttaa gtggaaggat ttggctaaag ttgctgttca tgaaggtggt | 2820 |
| agttccgata atgatatcgt tgaattcgtt tccgaattga tcaaggccta a | 2871 |

SEQ ID NO: 138
Artificial Sequence

| | |
|---|---|
| MDAMATTEKK PHVIFIPFPA QSHIKAMLKL AQLLHHKGLQ ITFVNTDFIH NQFLESSGPH | 60 |
| CLDGAPGFRF ETIPDGVSHS PEASIPIRES LLRSIETNFL DRFIDLVTKL PDPPTCIISD | 120 |
| GFLSVFTIDA AKKLGIPVMM YWTLAACGFM GFYHIHSLIE KGFAPLKDAS YLTNGYLDTV | 180 |
| IDWVPGMEGI RLKDFPLDWS TDLNDKVLMF TTEAPQRSHK VSHHIFHTFD ELEPSIIKTL | 240 |
| SLRYNHIYTI GPLQLLLDQI PEEKKQTGIT SLHGYSLVKE EPECFQWLQS KEPNSVVYVN | 300 |
| FGSTTVMSLE DMTEFGWGLA NSNHYFLWII RSNLVIGENA VLPPELEEHI KKRGFIASWC | 360 |
| SQEKVLKHPS VGGFLTHCGW GSTIESLSAG VPMICWPYSW DQLTNCRYIC KEWEVGLEMG | 420 |
| TKVKRDEVKR LVQELMGEGG HKMRNKAKDW KEKARIAIAP NGSSSLNIDK MVKEITVLAR | 480 |
| NGGGGSGGGG SGGGGSMAEQ QKIKKSPHVL LIPFPLQGHI NPFIQFGKRL ISKGVKTTLV | 540 |
| TTIHTLNSTL NHSNTTTTSI EIQAISDGCD EGGFMSAGES YLETFKQVGS KSLADLIKKL | 600 |
| QSEGTTIDAI IYDSMTEWVL DVAIEFGIDG GSFFTQACVV NSLYYHVHKG LISLPLGETV | 660 |
| SVPGFPVLQR WETPLILQNH EQIQSPWSQM LFGQFANIDQ ARWVFTNSFY KLEEEVIEWT | 720 |
| RKIWNLKVIG PTLPSMYLDK RLDDDKDNGF NLYKANHHEC MNWLDDKPKE SVVYVAFGSL | 780 |
| VKHGPEQVEE ITRALIDSDV NFLWVIKHKE EGKLPENLSE VIKTGKGLIV AWCKQLDVLA | 840 |
| HESVGCFVTH CGFNSTLEAI SLGVPVVAMP QFSDQTTNAK LLDEILGVGV RVKADENGIV | 900 |
| RRGNLASCIK MIMEEERGVI IRKNAVKWKD LAKVAVHEGG SSDNDIVEFV SELIKA | 956 |

SEQ ID NO: 139
Artificial Sequence

| | |
|---|---|
| atggatgcta tggctaccac cgaaaaaaag ccacatgtta ttttcattcc attcccagct | 60 |
| caatcccata ttaaggctat gttgaagttg gcccaattat tgcatcacaa gggtttacaa | 120 |
| atcaccttcg ttaacaccga cttcatccac aatcaattct tggaatcttc tggtccacat | 180 |
| tgcttggatg gtgctccagg ttttagattt gaaactattc cagatggtgt ttcccattct | 240 |
| ccagaagctt ctattccaat tagagaatcc ttgttgagat ccatcgaaac taatttcttg | 300 |
| gacagattca tcgacttggt tactaagttg ccagatccac caacctgtat tatttctgat | 360 |
| ggtttcttgt ccgttttcac cattgatgct gctaagaaat tgggtatccc agttatgatg | 420 |
| tactggactt tggctgcttg tggttttatg ggtttctacc atatccattc cttgatcgaa | 480 |
| aagggttttg ctccattgaa agatgcctct tacttgacta acggttactt ggataccgtt | 540 |
| attgattggg ttccaggtat ggaaggtatc agattgaagg attttccatt ggattggtcc | 600 |
| actgatttga acgataaggt tttgatgttc actaccgaag ctccacaaag atctcataag | 660 |
| gtttcccatc atatcttcca caccttcgat gaattggaac catccattat taagaccttg | 720 |
| tccttgagat acaaccacat ctataccatt ggtccattgc aattattatt ggaccaaatc | 780 |
| ccagaagaaa agaagcaaac tggtattact tccttgcacg gttactcatt ggtcaaagaa | 840 |
| gaaccagaat gcttccaatg gttgcaatct aaagaaccta actccgttgt ctacgttaac | 900 |
| tttggttcta ctaccgttat gtccttggaa gatatgactg aatttggttg gggtttggct | 960 |
| aactctaacc attacttctt gtggatcatc agatccaact tggttattgg tgaaaacgct | 1020 |
| gttttgccac cagaattgga agaacatatc aagaagagag gtttcattgc ttcttggtgt | 1080 |
| tcccaagaaa aggttttgaa acatccatct gtcggtggtt tcttgactca ttgtggttgg | 1140 |
| ggttctacca ttgaatcttt gtctgctggt gttccaatga tttgttggcc atattcttgg | 1200 |
| gatcaattga ccaactgcag atacatctgc aaagaatggg aagtcggttt ggaaatgggt | 1260 |
| acaaaagtca aaagagatga agtcaagaga ttggtccaag aattgatggg tgaaggtggt | 1320 |
| cataagatga gaaacaaagc caaggactgg aaagaaaagg ctagaattgc tattgctcca | 1380 |
| aacggttctt cctctttgaa cattgacaag atggtcaaag aaatcaccgt tttggccaga | 1440 |
| aacggtggag gaggctctat ggctgaacaa caaaagatca agaagtctcc acacgttttg | 1500 |
| ttgattccat ttccattgca aggtcacatc aacccattca ttcaattcgg taagagattg | 1560 |
| atttccaagg gtgttaagac tactttggtt actaccatcc ataccttgaa ctctaccttg | 1620 |
| aaccattcta acactaccac cacctccatt gaaattcaag ctatttccga tggttgtgat | 1680 |
| gaaggtggtt ttatgtctgc tggtgaatct tacttggaaa cctttaagca agttggttct | 1740 |
| aagtccttgg ccgatttgat taagaagttg caatctgaag gtactaccat tgatgccatt | 1800 |
| atctacgatt ctatgaccga atgggttttg gatgttgcta ttgaattcgg tattgatggt | 1860 |
| ggttcattct tcactcaagc ttgtgttgtt aactccttgt actaccatgt tcacaagggt | 1920 |
| ttgatctcat tgccattggg tgaaactgtt tctgttccag gtttcccagt tttacaaaga | 1980 |
| tgggaaactc cattgatctt gcaaaaccac gaacaaattc aatctccatg gtcccaaatg | 2040 |
| ttgtttggtc aattcgccaa cattgatcaa gctagatggg tttttaccaa ctccttctac | 2100 |
| aagttggaag aagaagttat cgaatggacc agaaagatct ggaacttgaa agttattggt | 2160 |
| ccaaccttgc catctatgta cttggataag agattggatg acgataagga caacggtttc | 2220 |
| aacttgtaca aggctaacca tcatgaatgc atgaattggt tggacgacaa gccaaaagaa | 2280 |
| tccgttgttt atgttgcttt cggttctttg gtcaaacatg gtccagaaca agttgaagaa | 2340 |
| attaccagag ccttgatcga ttccgatgtt aatttcttgt gggtcatcaa gcacaaagaa | 2400 |
| gaaggtaaat tgccagaaaa cttgtccgaa gttatcaaaa ctggtaaggg tttgattgtc | 2460 |
| gcttggtgta aacaattgga tgttttggct catgaatccg ttggttgttt cgttactcat | 2520 |
| tgtggtttca actccacctt ggaagctatt tctttgggtg ttccagttgt tgctatgcca | 2580 |
| caattttctg atcaaactac caacgctaag ttgttggacg aaattttggg tgttggtgtt | 2640 |
| agagttaagg ctgacgaaaa tggtatcgtt agaagaggta acttggcttc ttgcatcaag | 2700 |
| atgatcatgg aagaagaaag aggtgtcatc attagaaaga acgctgttaa gtggaaggat | 2760 |
| ttggctaaag ttgctgttca tgaaggtggt agttccgata atgatatcgt tgaattcgtt | 2820 |
| tccgaattga tcaaggccta a | 2841 |

SEQ ID NO: 140
Artificial Sequence

| | |
|---|---|
| MDAMATTEKK PHVIFIPFPA QSHIKAMLKL AQLLHHKGLQ ITFVNTDFIH NQFLESSGPH | 60 |
| CLDGAPGFRF ETIPDGVSHS PEASIPIRES LLRSIETNFL DRFIDLVTKL PDPPTCIISD | 120 |
| GFLSVFTIDA AKKLGIPVMM YWTLAACGFM GFYHIHSLIE KGFAPLKDAS YLTNGYLDTV | 180 |
| IDWVPGMEGI RLKDFPLDWS TDLNDKVLMF TTEAPQRSHK VSHHIFHTFD ELEPSIIKTL | 240 |
| SLRYNHIYTI GPLQLLLDQI PEEKKQTGIT SLHGYSLVKE EPECFQWLQS KEPNSVVYVN | 300 |
| FGSTTVMSLE DMTEFGWGLA NSNHYFLWII RSNLVIGENA VLPPELEEHI KKRGFIASWC | 360 |
| SQEKVLKHPS VGGFLTHCGW GSTIESLSAG VPMICWPYSW DQLTNCRYIC KEWEVGLEMG | 420 |
| TKVKRDEVKR LVQELMGEGG HKMRNKAKDW KEKARIAIAP NGSSSLNIDK MVKEITVLAR | 480 |
| NGGGGSMAEQ QKIKKSPHVL LIPFPLQGHI NPFIQFGKRL ISKGVKTTLV TTIHTLNSTL | 540 |
| NHSNTTTTSI EIQAISDGCD EGGFMSAGES YLETFKQVGS KSLADLIKKL QSEGTTIDAI | 600 |
| IYDSMTEWVL DVAIEFGIDG GSFFTQACVV NSLYYHVHKG LISLPLGETV SVPGFPVLQR | 660 |
| WETPLILQNH EQIQSPWSQM LFGQFANIDQ ARWVFTNSFY KLEEEVIEWT RKIWNLKVIG | 720 |
| PTLPSMYLDK RLDDDKDNGF NLYKANHHEC MNWLDDKPKE SVVYVAFGSL VKHGPEQVEE | 780 |
| ITRALIDSDV NFLWVIKHKE EGKLPENLSE VIKTGKGLIV AWCKQLDVLA HESVGCFVTH | 840 |
| CGFNSTLEAI SLGVPVVAMP QFSDQTTNAK LLDEILGVGV RVKADENGIV RRGNLASCIK | 900 |
| MIMEEERGVI IRKNAVKWKD LAKVAVHEGG SSDNDIVEFV SELIKA | 946 |

SEQ ID NO: 141
Artificial Sequence

| | |
|---|---|
| atggatgcta tggctaccac cgaaaaaaag ccacatgtta ttttcattcc attcccagct | 60 |
| caatcccata ttaaggctat gttgaagttg gcccaattat tgcatcacaa gggtttacaa | 120 |
| atcaccttcg ttaacaccga cttcatccac aatcaattct tggaatcttc tggtccacat | 180 |
| tgcttggatg gtgctccagg ttttagattt gaaactattc cagatggtgt ttcccattct | 240 |
| ccagaagctt ctattccaat tagagaatcc ttgttgagat ccatcgaaac taatttcttg | 300 |
| gacagattca tcgacttggt tactaagttg ccagatccac caacctgtat tatttctgat | 360 |
| ggtttcttgt ccgttttcac cattgatgct gctaagaaat tgggtatccc agttatgatg | 420 |
| tactggactt tggctgcttg tggttttatg ggtttctacc atatccattc cttgatcgaa | 480 |
| aagggttttg ctccattgaa agatgcctct tacttgacta acggttactt ggataccgtt | 540 |
| attgattggg ttccaggtat ggaaggtatc agattgaagg attttccatt ggattggtcc | 600 |
| actgatttga acgataaggt tttgatgttc actaccgaag ctccacaaag atctcataag | 660 |
| gtttcccatc atatcttcca caccttcgat gaattggaac catccattat taagaccttg | 720 |
| tccttgagat acaaccacat ctataccatt ggtccattgc aattattatt ggaccaaatc | 780 |
| ccagaagaaa agaagcaaac tggtattact tccttgcacg gttactcatt ggtcaaagaa | 840 |
| gaaccagaat gcttccaatg gttgcaatct aaagaaccta actccgttgt ctacgttaac | 900 |
| tttggttcta ctaccgttat gtccttggaa gatatgactg aatttggttg gggtttggct | 960 |
| aactctaacc attacttctt gtggatcatc agatccaact tggttattgg tgaaaacgct | 1020 |
| gttttgccac cagaattgga agaacatatc aagaagagag gtttcattgc ttcttggtgt | 1080 |
| tcccaagaaa aggttttgaa acatccatct gtcggtggtt tcttgactca ttgtggttgg | 1140 |
| ggttctacca ttgaatcttt gtctgctggt gttccaatga tttgttggcc atattcttgg | 1200 |
| gatcaattga ccaactgcag atacatctgc aaagaatggg aagtcggttt ggaaatgggt | 1260 |
| acaaaagtca aaagagatga agtcaagaga ttggtccaag aattgatggg tgaaggtggt | 1320 |
| cataagatga gaaacaaagc caaggactgg aaagaaaagg ctagaattgc tattgctcca | 1380 |
| aacggttctt cctctttgaa cattgacaag atggtcaaag aaatcaccgt tttggccaga | 1440 |
| aacatggctg aacaacaaaa gatcaagaag tctccacacg ttttgttgat tccatttcca | 1500 |
| ttgcaaggtc acatcaaccc attcattcaa ttcggtaaga gattgatttc caagggtgtt | 1560 |
| aagactactt tggttactac catccatacc ttgaactcta ccttgaacca ttctaacact | 1620 |
| accaccacct ccattgaaat tcaagctatt tccgatggtt gtgatgaagg tggttttatg | 1680 |
| tctgctggtg aatcttactt ggaaaccttt aagcaagttg gttctaagtc cttggccgat | 1740 |
| ttgattaaga agttgcaatc tgaaggtact accattgatg ccattatcta cgattctatg | 1800 |
| accgaatggg ttttggatgt tgctattgaa ttcggtattg atggtggttc attcttcact | 1860 |
| caagcttgtg ttgttaactc cttgtactac catgttcaca agggtttgat ctcattgcca | 1920 |
| ttgggtgaaa ctgtttctgt tccaggtttc ccagttttac aaagatggga aactccattg | 1980 |
| atcttgcaaa accacgaaca aattcaatct ccatggtccc aaatgttgtt tggtcaattc | 2040 |
| gccaacattg atcaagctag atgggttttt accaactcct tctacaagtt ggaagaagaa | 2100 |
| gttatcgaat ggaccagaaa gatctggaac ttgaaagtta ttggtccaac cttgccatct | 2160 |
| atgtacttgg ataagagatt ggatgacgat aaggacaacg gtttcaactt gtacaaggct | 2220 |
| aaccatcatg aatgcatgaa ttggttggac gacaagccaa aagaatccgt tgtttatgtt | 2280 |
| gctttcggtt ctttggtcaa acatggtcca gaacaagttg aagaaattac cagagccttg | 2340 |
| atcgattccg atgttaattt cttgtgggtc atcaagcaca aagaagaagg taaattgcca | 2400 |
| gaaaacttgt ccgaagttat caaaactggt aagggtttga ttgtcgcttg gtgtaaacaa | 2460 |
| ttggatgttt tggctcatga atccgttggt tgtttcgtta ctcattgtgg tttcaactcc | 2520 |
| accttggaag ctatttcttt gggtgttcca gttgttgcta tgccacaatt ttctgatcaa | 2580 |
| actaccaacg ctaagttgtt ggacgaaatt ttgggtgttg gtgttagagt taaggctgac | 2640 |
| gaaaatggta tcgttagaag aggtaacttg gcttcttgca tcaagatgat catggaagaa | 2700 |
| gaaagaggtg tcatcattag aaagaacgct gttaagtgga aggatttggc taaagttgct | 2760 |
| gttcatgaag gtggtagttc cgataatgat atcgttgaat tcgtttccga attgatcaag | 2820 |
| gcctaa | 2826 |

SEQ ID NO: 142
Artificial Sequence

| | |
|---|---|
| MDAMATTEKK PHVIFIPFPA QSHIKAMLKL AQLLHHKGLQ ITFVNTDFIH NQFLESSGPH | 60 |
| CLDGAPGFRF ETIPDGVSHS PEASIPIRES LLRSIETNFL DRFIDLVTKL PDPPTCIISD | 120 |
| GFLSVFTIDA AKKLGIPVMM YWTLAACGFM GFYHIHSLIE KGFAPLKDAS YLTNGYLDTV | 180 |
| IDWVPGMEGI RLKDFPLDWS TDLNDKVLMF TTEAPQRSHK VSHHIFHTFD ELEPSIIKTL | 240 |
| SLRYNHIYTI GPLQLLLDQI PEEKKQTGIT SLHGYSLVKE EPECFQWLQS KEPNSVVYVN | 300 |
| FGSTTVMSLE DMTEFGWGLA NSNHYFLWII RSNLVIGENA VLPPELEEHI KKRGFIASWC | 360 |
| SQEKVLKHPS VGGFLTHCGW GSTIESLSAG VPMICWPYSW DQLTNCRYIC KEWEVGLEMG | 420 |
| TKVKRDEVKR LVQELMGEGG HKMRNKAKDW KEKARIAIAP NGSSSLNIDK MVKEITVLAR | 480 |
| NMAEQQKIKK SPHVLLIPFP LQGHINPFIQ FGKRLISKGV KTTLVTTIHT LNSTLNHSNT | 540 |
| TTTSIEIQAI SDGCDEGGFM SAGESYLETF KQVGSKSLAD LIKKLQSEGT TIDAIIYDSM | 600 |
| TEWVLDVAIE FGIDGGSFFT QACVVNSLYY HVHKGLISLP LGETVSVPGF PVLQRWETPL | 660 |
| ILQNHEQIQS PWSQMLFGQF ANIDQARWVF TNSFYKLEEE VIEWTRKIWN LKVIGPTLPS | 720 |
| MYLDKRLDDD KDNGFNLYKA NHHECMNWLD DKPKESVVYV AFGSLVKHGP EQVEEITRAL | 780 |
| IDSDVNFLWV IKHKEEGKLP ENLSEVIKTG KGLIVAWCKQ LDVLAHESVG CFVTHCGFNS | 840 |
| TLEAISLGVP VVAMPQFSDQ TTNAKLLDEI LGVGVRVKAD ENGIVRRGNL ASCIKMIMEE | 900 |
| ERGVIIRKNA VKWKDLAKVA VHEGGSSDND IVEFVSELIK A | 941 |

SEQ ID NO: 143
Artificial Sequence

| | |
|---|---|
| atggctgaac aacaaaagat caagaagtct ccacacgttt tgttgattcc atttccattg | 60 |
| caaggtcaca tcaacccatt cattcaattc ggtaagagat tgatttccaa gggtgttaag | 120 |
| actactttgg ttactaccat ccataccttg aactctacct tgaaccattc taacactacc | 180 |
| accacctcca ttgaaattca agctatttcc gatggttgtg atgaaggtgg ttttatgtct | 240 |
| gctggtgaat cttacttgga aacctttaag caagttggtt ctaagtcctt ggccgatttg | 300 |
| attaagaagt tgcaatctga aggtactacc attgatgcca ttatctacga ttctatgacc | 360 |
| gaatgggttt tggatgttgc tattgaattc ggtattgatg gtggttcatt cttcactcaa | 420 |
| gcttgtgttg ttaactcctt gtactaccat gttcacaagg gtttgatctc attgccattg | 480 |
| ggtgaaactg tttctgttcc aggtttccca gttttacaaa gatgggaaac tccattgatc | 540 |
| ttgcaaaacc acgaacaaat tcaatctcca tggtcccaaa tgttgtttgg tcaattcgcc | 600 |
| aacattgatc aagctagatg ggtttttacc aactccttct acaagttgga agaagaagtt | 660 |
| atcgaatgga ccagaaagat ctggaacttg aaagttattg gtccaacctt gccatctatg | 720 |
| tacttggata agagattgga tgacgataag gacaacggtt tcaacttgta caaggctaac | 780 |
| catcatgaat gcatgaattg gttggacgac aagccaaaag aatccgttgt ttatgttgct | 840 |
| ttcggttctt tggtcaaaca tggtccagaa caagttgaag aaattaccag agccttgatc | 900 |
| gattccgatg ttaatttctt gtgggtcatc aagcacaaag aagaaggtaa attgccagaa | 960 |
| aacttgtccg aagttatcaa aactggtaag ggtttgattg tcgcttggtg taaacaattg | 1020 |
| gatgttttgg ctcatgaatc cgttggttgt ttcgttactc attgtggttt caactccacc | 1080 |
| ttggaagcta tttctttggg tgttccagtt gttgctatgc cacaattttc tgatcaaact | 1140 |
| accaacgcta agttgttgga cgaaattttg ggtgttggtg ttagagttaa ggctgacgaa | 1200 |
| aatggtatcg ttagaagagg taacttggct tcttgcatca agatgatcat ggaagaagaa | 1260 |
| agaggtgtca tcattagaaa gaacgctgtt aagtggaagg atttggctaa agttgctgtt | 1320 |
| catgaaggtg gtagttccga taatgatatc gttgaattcg tttccgaatt gatcaaggcc | 1380 |
| ggtggaggag gctctggtgg aggcggtagc ggaggcggag ggtcgatgga tgctatggct | 1440 |
| accaccgaaa aaaagccaca tgttattttc attccattcc cagctcaatc ccatattaag | 1500 |
| gctatgttga agttggccca attattgcat cacaagggtt tacaaatcac cttcgttaac | 1560 |
| accgacttca tccacaatca attcttggaa tcttctggtc cacattgctt ggatggtgct | 1620 |
| ccaggtttta gatttgaaac tattccagat ggtgtttccc attctccaga agcttctatt | 1680 |
| ccaattagag aatccttgtt gagatccatc gaaactaatt tcttggacag attcatcgac | 1740 |
| ttggttacta agttgccaga tccaccaacc tgtattattt ctgatggttt cttgtccgtt | 1800 |
| ttcaccattg atgctgctaa gaaattgggt atcccagtta tgatgtactg gactttggct | 1860 |
| gcttgtggtt ttatgggttt ctaccatatc cattccttga tcgaaaaggg ttttgctcca | 1920 |
| ttgaaagatg cctcttactt gactaacggt tacttggata ccgttattga ttgggttcca | 1980 |
| ggtatggaag gtatcagatt gaaggatttt ccattggatt ggtccactga tttgaacgat | 2040 |
| aaggttttga tgttcactac cgaagctcca caaagatctc ataaggtttc ccatcatatc | 2100 |
| ttccacacct tcgatgaatt ggaaccatcc attattaaga ccttgtcctt gagatacaac | 2160 |
| cacatctata ccattggtcc attgcaatta ttattggacc aaatcccaga agaaaagaag | 2220 |
| caaactggta ttacttcctt gcacggttac tcattggtca aagaagaacc agaatgcttc | 2280 |
| caatggttgc aatctaaaga acctaactcc gttgtctacg ttaactttgg ttctactacc | 2340 |
| gttatgtcct tggaagatat gactgaattt ggttggggtt tggctaactc taaccattac | 2400 |
| ttcttgtgga tcatcagatc caacttggtt attggtgaaa acgctgtttt gccaccagaa | 2460 |
| ttggaagaac atatcaagaa gagaggtttc attgcttctt ggtgttccca agaaaaggtt | 2520 |
| ttgaaacatc catctgtcgg tggtttcttg actcattgtg gttggggttc taccattgaa | 2580 |
| tctttgtctg ctggtgttcc aatgatttgt tggccatatt cttgggatca attgaccaac | 2640 |
| tgcagataca tctgcaaaga atgggaagtc ggtttggaaa tgggtacaaa agtcaaaaga | 2700 |
| gatgaagtca agagattggt ccaagaattg atgggtgaag gtggtcataa gatgagaaac | 2760 |
| aaagccaagg actggaaaga aaaggctaga attgctattg ctccaaacgg ttcttcctct | 2820 |
| ttgaacattg acaagatggt caaagaaatc accgttttgg ccagaaactg a | 2871 |

SEQ ID NO: 144
Artificial Sequence

| | |
|---|---|
| MAEQQKIKKS PHVLLIPFPL QGHINPFIQF GKRLISKGVK TTLVTTIHTL NSTLNHSNTT | 60 |
| TTSIEIQAIS DGCDEGGFMS AGESYLETFK QVGSKSLADL IKKLQSEGTT IDAIIYDSMT | 120 |
| EWVLDVAIEF GIDGGSFFTQ ACVVNSLYYH VHKGLISLPL GETVSVPGFP VLQRWETPLI | 180 |
| LQNHEQIQSP WSQMLFGQFA NIDQARWVFT NSFYKLEEEV IEWTRKIWNL KVIGPTLPSM | 240 |
| YLDKRLDDDK DNGFNLYKAN HHECMNWLDD KPKESVVYVA FGSLVKHGPE QVEEITRALI | 300 |
| DSDVNFLWVI KHKEEGKLPE NLSEVIKTGK GLIVAWCKQL DVLAHESVGC FVTHCGFNST | 360 |
| LEAISLGVPV VAMPQFSDQT TNAKLLDEIL GVGVRVKADE NGIVRRGNLA SCIKMIMEEE | 420 |
| RGVIIRKNAV KWKDLAKVAV HEGGSSDNDI VEFVSELIKA GGGGSGGGGS GGGGSMDAMA | 480 |
| TTEKKPHVIF IPFPAQSHIK AMLKLAQLLH HKGLQITFVN TDFIHNQFLE SSGPHCLDGA | 540 |
| PGFRFETIPD GVSHSPEASI PIRESLLRSI ETNFLDRFID LVTKLPDPPT CIISDGFLSV | 600 |
| FTIDAAKKLG IPVMMYWTLA ACGFMGFYHI HSLIEKGFAP LKDASYLTNG YLDTVIDWVP | 660 |
| GMEGIRLKDF PLDWSTDLND KVLMFTTEAP QRSHKVSHHI FHTFDELEPS IIKTLSLRYN | 720 |
| HIYTIGPLQL LLDQIPEEKK QTGITSLHGY SLVKEEPECF QWLQSKEPNS VVYVNFGSTT | 780 |
| VMSLEDMTEF GWGLANSNHY FLWIIRSNLV IGENAVLPPE LEEHIKKRGF IASWCSQEKV | 840 |
| LKHPSVGGFL THCGWGSTIE SLSAGVPMIC WPYSWDQLTN CRYICKEWEV GLEMGTKVKR | 900 |
| DEVKRLVQEL MGEGGHKMRN KAKDWKEKAR IAIAPNGSSS LNIDKMVKEI TVLARN | 956 |

SEQ ID NO: 145
Artificial Sequence

| | |
|---|---|
| atggctgaac aacaaaagat caagaagtct ccacacgttt tgttgattcc atttccattg | 60 |
| caaggtcaca tcaacccatt cattcaattc ggtaagagat tgatttccaa gggtgttaag | 120 |
| actactttgg ttactaccat ccataccttg aactctacct tgaaccattc taacactacc | 180 |
| accacctcca ttgaaattca agctatttcc gatggttgtg atgaaggtgg ttttatgtct | 240 |
| gctggtgaat cttacttgga aacctttaag caagttggtt ctaagtcctt ggccgatttg | 300 |
| attaagaagt tgcaatctga aggtactacc attgatgcca ttatctacga ttctatgacc | 360 |
| gaatgggttt tggatgttgc tattgaattc ggtattgatg gtggttcatt cttcactcaa | 420 |
| gcttgtgttg ttaactcctt gtactaccat gttcacaagg gtttgatctc attgccattg | 480 |
| ggtgaaactg tttctgttcc aggtttccca gttttacaaa gatgggaaac tccattgatc | 540 |
| ttgcaaaacc acgaacaaat tcaatctcca tggtcccaaa tgttgtttgg tcaattcgcc | 600 |
| aacattgatc aagctagatg ggtttttacc aactccttct acaagttgga agaagaagtt | 660 |
| atcgaatgga ccagaaagat ctggaacttg aaagttattg gtccaacctt gccatctatg | 720 |
| tacttggata agagattgga tgacgataag gacaacggtt tcaacttgta caaggctaac | 780 |
| catcatgaat gcatgaattg gttggacgac aagccaaaag aatccgttgt ttatgttgct | 840 |
| ttcggttctt tggtcaaaca tggtccagaa caagttgaag aaattaccag agccttgatc | 900 |
| gattccgatg ttaatttctt gtgggtcatc aagcacaaag aagaaggtaa attgccagaa | 960 |
| aacttgtccg aagttatcaa aactggtaag ggtttgattg tcgcttggtg taaacaattg | 1020 |
| gatgttttgg ctcatgaatc cgttggttgt ttcgttactc attgtggttt caactccacc | 1080 |
| ttggaagcta tttctttggg tgttccagtt gttgctatgc cacaattttc tgatcaaact | 1140 |
| accaacgcta agttgttgga cgaaattttg ggtgttggtg ttagagttaa ggctgacgaa | 1200 |
| aatggtatcg ttagaagagg taacttggct tcttgcatca agatgatcat ggaagaagaa | 1260 |
| agaggtgtca tcattagaaa gaacgctgtt aagtggaagg atttggctaa agttgctgtt | 1320 |
| catgaaggtg gtagttccga taatgatatc gttgaattcg tttccgaatt gatcaaggcc | 1380 |
| ggtggaggag gctctatgga tgctatggct accaccgaaa aaaagccaca tgttattttc | 1440 |
| attccattcc cagctcaatc ccatattaag gctatgttga agttggccca attattgcat | 1500 |
| cacaagggtt tacaaatcac cttcgttaac accgacttca tccacaatca attcttggaa | 1560 |
| tcttctggtc cacattgctt ggatggtgct ccaggtttta gatttgaaac tattccagat | 1620 |
| ggtgtttccc attctccaga agcttctatt ccaattagag aatccttgtt gagatccatc | 1680 |
| gaaactaatt tcttggacag attcatcgac ttggttacta agttgccaga tccaccaacc | 1740 |
| tgtattattt ctgatggttt cttgtccgtt ttcaccattg atgctgctaa gaaattgggt | 1800 |
| atcccagtta tgatgtactg gactttggct gcttgtggtt ttatgggttt ctaccatatc | 1860 |
| cattccttga tcgaaaaggg ttttgctcca ttgaaagatg cctcttactt gactaacggt | 1920 |
| tacttggata ccgttattga ttgggttcca ggtatggaag gtatcagatt gaaggatttt | 1980 |
| ccattggatt ggtccactga tttgaacgat aaggttttga tgttcactac cgaagctcca | 2040 |
| caaagatctc ataaggtttc ccatcatatc ttccacacct tcgatgaatt ggaaccatcc | 2100 |
| attattaaga ccttgtcctt gagatacaac cacatctata ccattggtcc attgcaatta | 2160 |
| ttattggacc aaatcccaga agaaaagaag caaactggta ttacttcctt gcacggttac | 2220 |
| tcattggtca aagaagaacc agaatgcttc caatggttgc aatctaaaga acctaactcc | 2280 |
| gttgtctacg ttaactttgg ttctactacc gttatgtcct tggaagatat gactgaattt | 2340 |
| ggttggggtt tggctaactc taaccattac ttcttgtgga tcatcagatc caacttggtt | 2400 |
| attggtgaaa acgctgtttt gccaccagaa ttggaagaac atatcaagaa gagaggtttc | 2460 |
| attgcttctt ggtgttccca agaaaaggtt ttgaaacatc catctgtcgg tggtttcttg | 2520 |
| actcattgtg gttggggttc taccattgaa tctttgtctg ctggtgttcc aatgatttgt | 2580 |
| tggccatatt cttgggatca attgaccaac tgcagataca tctgcaaaga atgggaagtc | 2640 |
| ggtttggaaa tgggtacaaa agtcaaaaga gatgaagtca agagattggt ccaagaattg | 2700 |
| atgggtgaag gtggtcataa gatgagaaac aaagccaagg actggaaaga aaaggctaga | 2760 |
| attgctattg ctccaaacgg ttcttcctct ttgaacattg acaagatggt caaagaaatc | 2820 |
| accgttttgg ccagaaactg a | 2841 |

SEQ ID NO: 146
Artificial Sequence

| | |
|---|---|
| MAEQQKIKKS PHVLLIPFPL QGHINPFIQF GKRLISKGVK TTLVTTIHTL NSTLNHSNTT | 60 |
| TTSIEIQAIS DGCDEGGFMS AGESYLETFK QVGSKSLADL IKKLQSEGTT IDAIIYDSMT | 120 |
| EWVLDVAIEF GIDGGSFFTQ ACVVNSLYYH VHKGLISLPL GETVSVPGFP VLQRWETPLI | 180 |
| LQNHEQIQSP WSQMLFGQFA NIDQARWVFT NSFYKLEEEV IEWTRKIWNL KVIGPTLPSM | 240 |
| YLDKRLDDDK DNGFNLYKAN HHECMNWLDD KPKESVVYVA FGSLVKHGPE QVEEITRALI | 300 |
| DSDVNFLWVI KHKEEGKLPE NLSEVIKTGK GLIVAWCKQL DVLAHESVGC FVTHCGFNST | 360 |
| LEAISLGVPV VAMPQFSDQT TNAKLLDEIL GVGVRVKADE NGIVRRGNLA SCIKMIMEEE | 420 |
| RGVIIRKNAV KWKDLAKVAV HEGGSSDNDI VEFVSELIKA GGGGSMDAMA TTEKKPHVIF | 480 |
| IPFPAQSHIK AMLKLAQLLH HKGLQITFVN TDFIHNQFLE SSGPHCLDGA PGFRFETIPD | 540 |
| GVSHSPEASI PIRESLLRSI ETNFLDRFID LVTKLPDPPT CIISDGFLSV FTIDAAKKLG | 600 |
| IPVMMYWTLA ACGFMGFYHI HSLIEKGFAP LKDASYLTNG YLDTVIDWVP GMEGIRLKDF | 660 |
| PLDWSTDLND KVLMFTTEAP QRSHKVSHHI FHTFDELEPS IIKTLSLRYN HIYTIGPLQL | 720 |
| LLDQIPEEKK QTGITSLHGY SLVKEEPECF QWLQSKEPNS VVYVNFGSTT VMSLEDMTEF | 780 |
| GWGLANSNHY FLWIIRSNLV IGENAVLPPE LEEHIKKRGF IASWCSQEKV LKHPSVGGFL | 840 |
| THCGWGSTIE SLSAGVPMIC WPYSWDQLTN CRYICKEWEV GLEMGTKVKR DEVKRLVQEL | 900 |
| MGEGGHKMRN KAKDWKEKAR IAIAPNGSSS LNIDKMVKEI TVLARN | 946 |

SEQ ID NO: 147
Artificial Sequence

| | |
|---|---|
| atggctgaac aacaaaagat caagaagtct ccacacgttt tgttgattcc atttccattg | 60 |
| caaggtcaca tcaacccatt cattcaattc ggtaagagat tgatttccaa gggtgttaag | 120 |
| actactttgg ttactaccat ccataccttg aactctacct tgaaccattc taacactacc | 180 |
| accacctcca ttgaaattca agctatttcc gatggttgtg atgaaggtgg ttttatgtct | 240 |
| gctggtgaat cttacttgga aacctttaag caagttggtt ctaagtcctt ggccgatttg | 300 |
| attaagaagt tgcaatctga aggtactacc attgatgcca ttatctacga ttctatgacc | 360 |
| gaatgggttt tggatgttgc tattgaattc ggtattgatg gtggttcatt cttcactcaa | 420 |
| gcttgtgttg ttaactcctt gtactaccat gttcacaagg gtttgatctc attgccattg | 480 |
| ggtgaaactg tttctgttcc aggtttccca gttttacaaa gatgggaaac tccattgatc | 540 |
| ttgcaaaacc acgaacaaat tcaatctcca tggtcccaaa tgttgtttgg tcaattcgcc | 600 |
| aacattgatc aagctagatg ggtttttacc aactccttct acaagttgga agaagaagtt | 660 |
| atcgaatgga ccagaaagat ctggaacttg aaagttattg gtccaacctt gccatctatg | 720 |
| tacttggata agagattgga tgacgataag gacaacggtt tcaacttgta caaggctaac | 780 |
| catcatgaat gcatgaattg gttggacgac aagccaaaag aatccgttgt ttatgttgct | 840 |
| ttcggttctt tggtcaaaca tggtccagaa caagttgaag aaattaccag agccttgatc | 900 |
| gattccgatg ttaatttctt gtgggtcatc aagcacaaag aagaaggtaa attgccagaa | 960 |
| aacttgtccg aagttatcaa aactggtaag ggtttgattg tcgcttggtg taaacaattg | 1020 |
| gatgttttgg ctcatgaatc cgttggttgt ttcgttactc attgtggttt caactccacc | 1080 |
| ttggaagcta tttctttggg tgttccagtt gttgctatgc cacaattttc tgatcaaact | 1140 |
| accaacgcta agttgttgga cgaaattttg ggtgttggtg ttagagttaa ggctgacgaa | 1200 |
| aatggtatcg ttagaagagg taacttggct tcttgcatca agatgatcat ggaagaagaa | 1260 |
| agaggtgtca tcattagaaa gaacgctgtt aagtggaagg atttggctaa agttgctgtt | 1320 |
| catgaaggtg gtagttccga taatgatatc gttgaattcg tttccgaatt gatcaaggcc | 1380 |
| atggatgcta tggctaccac cgaaaaaaag ccacatgtta ttttcattcc attcccagct | 1440 |
| caatcccata ttaaggctat gttgaagttg gcccaattat tgcatcacaa gggtttacaa | 1500 |
| atcaccttcg ttaacaccga cttcatccac aatcaattct tggaatcttc tggtccacat | 1560 |
| tgcttggatg gtgctccagg ttttagattt gaaactattc cagatggtgt ttcccattct | 1620 |
| ccagaagctt ctattccaat tagagaatcc ttgttgagat ccatcgaaac taatttcttg | 1680 |
| gacagattca tcgacttggt tactaagttg ccagatccac caacctgtat tatttctgat | 1740 |
| ggtttcttgt ccgttttcac cattgatgct gctaagaaat tgggtatccc agttatgatg | 1800 |
| tactggactt tggctgcttg tggttttatg ggtttctacc atatccattc cttgatcgaa | 1860 |
| aagggttttg ctccattgaa agatgcctct tacttgacta acggttactt ggataccgtt | 1920 |
| attgattggg ttccaggtat ggaaggtatc agattgaagg attttccatt ggattggtcc | 1980 |
| actgatttga acgataaggt tttgatgttc actaccgaag ctccacaaag atctcataag | 2040 |
| gtttcccatc atatcttcca caccttcgat gaattggaac catccattat taagaccttg | 2100 |
| tccttgagat acaaccacat ctataccatt ggtccattgc aattattatt ggaccaaatc | 2160 |
| ccagaagaaa agaagcaaac tggtattact tccttgcacg gttactcatt ggtcaaagaa | 2220 |
| gaaccagaat gcttccaatg gttgcaatct aaagaaccta actccgttgt ctacgttaac | 2280 |
| tttggttcta ctaccgttat gtccttggaa gatatgactg aatttggttg gggtttggct | 2340 |
| aactctaacc attacttctt gtggatcatc agatccaact tggttattgg tgaaaacgct | 2400 |
| gttttgccac cagaattgga agaacatatc aagaagagag gtttcattgc ttcttggtgt | 2460 |
| tcccaagaaa aggttttgaa acatccatct gtcggtggtt tcttgactca ttgtggttgg | 2520 |
| ggttctacca ttgaatcttt gtctgctggt gttccaatga tttgttggcc atattcttgg | 2580 |
| gatcaattga ccaactgcag atacatctgc aaagaatggg aagtcggttt ggaaatgggt | 2640 |
| acaaaagtca aaagagatga agtcaagaga ttggtccaag aattgatggg tgaaggtggt | 2700 |
| cataagatga gaaacaaagc caaggactgg aaagaaaagg ctagaattgc tattgctcca | 2760 |
| aacggttctt cctctttgaa cattgacaag atggtcaaag aaatcaccgt tttggccaga | 2820 |
| aactga | 2826 |

SEQ ID NO: 148
Artificial Sequence

| | |
|---|---|
| MAEQQKIKKS PHVLLIPFPL QGHINPFIQF GKRLISKGVK TTLVTTIHTL NSTLNHSNTT | 60 |
| TTSIEIQAIS DGCDEGGFMS AGESYLETFK QVGSKSLADL IKKLQSEGTT IDAIIYDSMT | 120 |
| EWVLDVAIEF GIDGGSFFTQ ACVVNSLYYH VHKGLISLPL GETVSVPGFP VLQRWETPLI | 180 |
| LQNHEQIQSP WSQMLFGQFA NIDQARWVFT NSFYKLEEEV IEWTRKIWNL KVIGPTLPSM | 240 |
| YLDKRLDDDK DNGFNLYKAN HHECMNWLDD KPKESVVYVA FGSLVKHGPE QVEEITRALI | 300 |
| DSDVNFLWVI KHKEEGKLPE NLSEVIKTGK GLIVAWCKQL DVLAHESVGC FVTHCGFNST | 360 |
| LEAISLGVPV VAMPQFSDQT TNAKLLDEIL GVGVRVKADE NGIVRRGNLA SCIKMIMEEE | 420 |
| RGVIIRKNAV KWKDLAKVAV HEGGSSDNDI VEFVSELIKA MDAMATTEKK PHVIFIPFPA | 480 |
| QSHIKAMLKL AQLLHHKGLQ ITFVNTDFIH NQFLESSGPH CLDGAPGFRF ETIPDGVSHS | 540 |
| PEASIPIRES LLRSIETNFL DRFIDLVTKL PDPPTCIISD GFLSVFTIDA AKKLGIPVMM | 600 |
| YWTLAACGFM GFYHIHSLIE KGFAPLKDAS YLTNGYLDTV IDWVPGMEGI RLKDFPLDWS | 660 |
| TDLNDKVLMF TTEAPQRSHK VSHHIFHTFD ELEPSIIKTL SLRYNHIYTI GPLQLLLDQI | 720 |
| PEEKKQTGIT SLHGYSLVKE EPECFQWLQS KEPNSVVYVN FGSTTVMSLE DMTEFGWGLA | 780 |
| NSNHYFLWII RSNLVIGENA VLPPELEEHI KKRGFIASWC SQEKVLKHPS VGGFLTHCGW | 840 |
| GSTIESLSAG VPMICWPYSW DQLTNCRYIC KEWEVGLEMG TKVKRDEVKR LVQELMGEGG | 900 |
| HKMRNKAKDW KEKARIAIAP NGSSSLNIDK MVKEITVLAR N | 941 |

SEQ ID NO: 149
Artificial Sequence

| | |
|---|---|
| atggatgcta tggctaccac cgaaaaaaag ccacatgtta ttttcattcc attcccagct | 60 |
| caatcccata ttaaggctat gttgaagttg gcccaattat tgcatcacaa gggtttacaa | 120 |
| atcaccttcg ttaacaccga cttcatccac aatcaattct tggaatcttc tggtccacat | 180 |
| tgcttggatg gtgctccagg ttttagattt gaaactattc cagatggtgt ttcccattct | 240 |
| ccagaagctt ctattccaat tagagaatcc ttgttgagat ccatcgaaac taatttcttg | 300 |
| gacagattca tcgacttggt tactaagttg ccagatccac caacctgtat tatttctgat | 360 |
| ggtttcttgt ccgttttcac cattgatgct gctaagaaat tgggtatccc agttatgatg | 420 |
| tactggactt tggctgcttg tggttttatg ggtttctacc atatccattc cttgatcgaa | 480 |
| aagggttttg ctccattgaa agatgcctct tacttgacta acggttactt ggataccgtt | 540 |
| attgattggg ttccaggtat ggaaggtatc agattgaagg attttccatt ggattggtcc | 600 |
| actgatttga acgataaggt tttgatgttc actaccgaag ctccacaaag atctcataag | 660 |
| gtttcccatc atatcttcca caccttcgat gaattggaac catccattat taagaccttg | 720 |
| tccttgagat acaaccacat ctataccatt ggtccattgc aattattatt ggaccaaatc | 780 |
| ccagaagaaa agaagcaaac tggtattact tccttgcacg gttactcatt ggtcaaagaa | 840 |
| gaaccagaat gcttccaatg gttgcaatct aaagaaccta actccgttgt ctacgttaac | 900 |
| tttggttcta ctaccgttat gtccttggaa gatatgactg aatttggttg gggtttggct | 960 |
| aactctaacc attacttctt gtggatcatc agatccaact tggttattgg tgaaaacgct | 1020 |
| gttttgccac cagaattgga agaacatatc aagaagagag gtttcattgc ttcttggtgt | 1080 |
| tcccaagaaa aggttttgaa acatccatct gtcggtggtt tcttgactca ttgtggttgg | 1140 |
| ggttctacca ttgaatcttt gtctgctggt gttccaatga tttgttggcc atattcttgg | 1200 |
| gatcaattga ccaactgcag atacatctgc aaagaatggg aagtcggttt ggaaatgggt | 1260 |
| acaaaagtca aaagagatga agtcaagaga ttggtccaag aattgatggg tgaaggtggt | 1320 |
| cataagatga gaaacaaagc caaggactgg aaagaaaagg ctagaattgc tattgctcca | 1380 |
| aacggttctt cctctttgaa cattgacaag atggtcaaag aaatcaccgt tttggccaga | 1440 |
| aac | 1443 |

SEQ ID NO: 150
Artificial Sequence

| | |
|---|---|
| RASSTKLVK | 9 |

SEQ ID NO: 151
Artificial Sequence

| | |
|---|---|
| EGKSSGSGSE SKST | 14 |

SEQ ID NO: 152
Escherichia coli

| | |
|---|---|
| MKAQYEDGKQ YTTLEKPVAG APQVLEFFSF FCPHCYQFEE VLHISDNVKK KLPEGVKMTK | 60 |
| YHVNFMGGDL GKDLTQAWAV AMALGVEDKV TVPLFEGVQK TQTIRSASDI RDVFINAGIK | 120 |
| GEEYDAAWNS FVVKSLVAQQ EKAAADVQLR GVPAMFVNGK YQLNPQGMDT SNMDVFVQQY | 180 |
| ADTVKYLSEK K | 191 |

SEQ ID NO: 153
Escherichia coli

| | |
|---|---|
| MKTEEGKLVI WINGDKGYNG LAEVGKKFEK DTGIKVTVEH PDKLEEKFPQ VAATGDGPDI | 60 |
| IFWAHDRFGG YAQSGLLAEI TPDKAFQDKL YPFTWDAVRY NGKLIAYPIA VEALSLIYNK | 120 |
| DLLPNPPKTW EEIPALDKEL KAKGKSALMF NLQEPYFTWP LIAADGGYAF KYENGKYDIK | 180 |
| DVGVDNAGAK AGLTFLVDLI KNKHMNADTD YSIAEAAFNK GETAMTINGP WAWSNIDTSK | 240 |
| VNYGVTVLPT FKGQPSKPFV GVLSAGINAA SPNKELAKEF LENYLLTDEG LEAVNKDKPL | 300 |
| GAVALKSYEE ELAKDPRIAA TMENAQKGEI MPNIPQMSAF WYAVRTAVIN AASGRQTVDE | 360 |
| ALKDAQT | 367 |

SEQ ID NO: 154
Escherichia coli

| | |
|---|---|
| MNKEILAVVE AVSNEKALPR EKIFEALESA LATATKKKYE QEIDVRVQID RKSGDFDTFR | 60 |
| RWLVVDEVTQ PTKEITLEAA RYEDESLNLG DYVEDQIESV TFDRITTQTA KQVIVQKVRE | 120 |
| AERAMVVDQF REHEGEIITG VVKKVNRDNI SLDLGNNAEA VILREDMLPR ENFRPGDRVR | 180 |
| GVLYSVRPEA RGAQLFVTRS KPEMLIELFR IEVPEIGEEV IEIKAAARDP GSRAKIAVKT | 240 |
| NDKRIDPVGA CVGMRGARVQ AVSTELGGER IDIVLWDDNP AQFVINAMAP ADVASIVVDE | 300 |
| DKHTMDIAVE AGNLAQAIGR NGQNVRLASQ LSGWELNVMT VDDLQAKHQA EAHAAIDTFT | 360 |
| KYLDIDEDFA TVLVEEGFST LEELAYVPMK ELLEIEGLDE PTVEALRERA KNALATIAQA | 420 |
| QEESLGDNKP ADDLLNLEGV DRDLAFKLAA RGVCTLEDLA EQGIDDLADI EGLTDEKAGA | 480 |
| LIMAARNICW FGDEA | 495 |

SEQ ID NO: 155
Saccharomyces cerevisiae

| | |
|---|---|
| MSDSEVNQEA KPEVKPEVKP ETHINLKVSD GSSEIFFKIK KTTPLRRLME AFAKRQGKEM | 60 |
| DSLTFLYDGI EIQADQTPED LDMEDNDIIE AHREQIGG | 98 |

SEQ ID NO: 156
Escherichia coli

| | |
|---|---|
| atgaaagcgc aatatgaaga tggaaagcag tatacgacct tagaaaaacc agtcgctgga | 60 |
| gctccgcaag tcttggaatt ctttagtttt ttttgtccgc attgttacca gtttgaggaa | 120 |
| gtcttgcata tatccgacaa cgtcaaaaag aagttgccag aaggcgttaa aatgacgaaa | 180 |
| tatcacgtta actttatggg aggtgacttg ggaaaagatc ttactcaagc ctgggccgtt | 240 |
| gcaatggcat tgggagttga agataaagtt acagtgccct tgtttgaagg agttcaaaag | 300 |
| acccagacta taaggtcagc ctccgacatt agagacgtct ttatcaatgc tgggattaag | 360 |
| ggcgaagagt atgatgccgc gtggaactcc tttgttgtca agagtttagt cgcacaacaa | 420 |
| gaaaaggctg ctgcagacgt tcagttaagg ggtgtgccag ccatgttcgt taatggtaag | 480 |
| tatcagttaa atccacaggg gatggataca tcaaacatgg atgtgttcgt gcaacagtac | 540 |
| gcagacactg ttaaatattt gtcagagaag aaa | 573 |

SEQ ID NO: 157
Escherichia coli

| | |
|---|---|
| atgaaaacag aagaagggaa attggttata tggataaacg gtgataaggg ctataacgga | 60 |
| ttagccgagg taggtaagaa gtttgaaaaa gatactggta taaaagttac tgttgaacat | 120 |
| ccggacaaac tggaagaaaa atttcctcaa gttgctgcaa ctggcgatgg tccagatata | 180 |
| atcttctggg cacatgacag attcggcggt tacgcacagt ccggattgct ggctgagatc | 240 |
| acccctgaca aggcgttcca agataagcta taccctttta catgggacgc agtgagatac | 300 |
| aatggaaaat tgattgctta cccaattgca gttgaggcac tgtctctgat ttacaataag | 360 |
| gacttgctac caaaccctcc aaaaacctgg gaagaaatcc cagccctgga caaagaacta | 420 |
| aaagctaaag gaaaatccgc cttgatgttt aacttgcaag agccttattt cacatggccg | 480 |
| ctaattgctg cagatggcgg ttatgctttt aaatatgaaa acggtaagta tgacatcaaa | 540 |
| gatgttggag tcgacaatgc aggtgctaag gccggcttaa ctttcttagt ggacttaatc | 600 |
| aagaataagc atatgaatgc agacactgat tacagcatag cggaggctgc tttcaacaaa | 660 |
| ggtgaaacag ctatgacaat aaatggccct tgggcctggt ctaatatcga cacgtctaaa | 720 |
| gttaattatg gggtaacagt acttccaacg tttaaaggcc agccatcaaa gccctttgta | 780 |
| ggtgtcctga gtgccggtat taacgcagcc agcccgaaca aagagttagc gaaagaattc | 840 |
| ttagaaaatt atttactgac cgatgagggt cttgaagcag tgaacaagga taaacctttg | 900 |
| ggtgcagtcg ctttgaagag ttacgaagaa gaactggcta aggaccccag aattgcagcc | 960 |
| actatggaaa atgcccaaaa gggagaaatt atgccaaata tacctcaaat gtcagccttc | 1020 |
| tggtatgcgg ttaggactgc cgttataaac gctgctagtg gaaggcagac ggtggatgaa | 1080 |
| gcacttaaag atgcgcagac a | 1101 |

SEQ ID NO: 158
Escherichia coli

| | |
|---|---|
| atgaataagg agattctagc agtcgttgaa gcagtaagta acgaaaaagc attgcctagg | 60 |
| gagaaaatct tcgaagccct agaaagcgct ttggccacag ccacgaaaaa gaagtacgag | 120 |
| caagaaattg acgttagagt tcagatcgac aggaaatcag gtgatttcga tacatttagg | 180 |
| agatggttag tagtagatga ggttacacag cctactaagg agattacatt agaggcggcc | 240 |
| agatacgaag acgaatcttt gaacttaggg gactatgttg aggatcaaat tgaatcagtt | 300 |
| acttttgata gaattacaac tcaaacagcc aaacaagtca tagttcaaaa agtgagggaa | 360 |
| gccgaaagag caatggtggt cgaccaattt cgtgagcacg aaggagagat cataacaggt | 420 |
| gtcgttaaaa aggttaatag agataatatt tctttggatc ttgggaataa tgccgaagct | 480 |
| gttatcctga gggaagatat gttgccgagg gaaaatttca gacctggaga tcgtgtcaga | 540 |
| ggtgttttgt attctgtacg tccagaggca agaggagctc aattatttgt tactcgttct | 600 |
| aaaccggaga tgcttattga actatttagg attgaggtgc ctgaaattgg agaagaagtt | 660 |
| attgagatca aagccgctgc acgtgatcca ggatcaagag cgaagattgc tgttaaaaca | 720 |
| aatgataaac gtatcgatcc cgtgggtgcg tgtgttggta tgaggggtgc tagagtccag | 780 |
| gctgtaagca ccgaactggg aggcgagagg attgacattg tcttgtggga cgataatcct | 840 |
| gcccagtttg taataaacgc aatggctcct gctgatgtgg cctctatagt cgtggatgag | 900 |
| gacaaacata ccatggatat agcagtagaa gctggtaatt tagcccaagc aattggaaga | 960 |
| aacggtcaaa acgtccgttt agcttcccag ttgtctggtt gggaactgaa cgtgatgacg | 1020 |
| gttgatgatt tacaagctaa gcaccaagca gaggctcatg cagcgattga taccttcact | 1080 |
| aaatatctag atatagacga ggattttgca actgtgcttg ttgaagaagg cttttctacg | 1140 |
| ttagaagaac tagcttacgt cccaatgaag gaattattag aaatcgaggg tttggatgaa | 1200 |
| cctacagtgg aggctttgag agaaagggcc aagaatgccc tagcaactat agctcaagca | 1260 |
| caagaggaat cactgggaga taataagcct gcagacgatt tgctgaacct agaaggtgta | 1320 |
| gatagggact tggcttttaa gctagcagcc agaggcgtgt gtacactaga ggatttggct | 1380 |
| gaacaaggaa tagatgacct agctgacatt gaagggttga cagatgaaaa agctggggcc | 1440 |
| ttaataatgg ccgctaggaa tatttgctgg ttcggggatg aggca | 1485 |

SEQ ID NO: 159
Saccharomyces cerevisiae

| | |
|---|---|
| atgagtgact ctgaagtgaa tcaagaggct aaaccagaag taaagcccga agtaaagcca | 60 |
| gagacccaca tcaacttgaa ggtttcagac gggtcttcag agatattctt taaaatcaaa | 120 |
| aagacaacgc ccttgagaag gctaatggaa gcgtttgcca agagacaagg aaaagaaatg | 180 |
| gatagtttaa ctttcttgta cgatgggatt gagattcaag cagatcaaac tccggaagat | 240 |
| ttggacatgg aagataatga tatcattgaa gctcatagag aacaaatcgg aggt | 294 |

SEQ ID NO: 160
Artificial Sequence

| | |
|---|---|
| atggctgaac aacaaaagat caagaagtct ccacacgttt tgttgattcc atttccattg | 60 |
| caaggtcaca tcaacccatt cattcaattc ggtaagagat tgatttccaa gggtgttaag | 120 |
| actactttgg ttactaccat ccataccttg aactctacct tgaaccattc taacactacc | 180 |
| accacctcca ttgaaattca agctatttcc gatggttgtg atgaaggtgg ttttatgtct | 240 |
| tggggtgaat cttacttgga aacctttaag caagttggtt ctaagtcctt ggccgatttg | 300 |
| attaagaagt tgcaatctga aggtactacc attgatgcca ttatctacga ttctatgacc | 360 |
| gaatgggttt tggatgttgc tattgaattc ggtattgatg gtggttcatt cttcactcaa | 420 |
| gcttgtgttg ttaactcctt gtactaccat gttcacaagg gtttgatctc attgccattg | 480 |
| ggtgaaactg tttctgttcc aggtttccca gttttacaaa gatgggaaac tccattgatc | 540 |
| ttgcaaaacc acgaacaaat tcaatctcca tggtcccaaa tgttgtttgg tcaattcgcc | 600 |
| aacattgatc aagctagatg ggtttttacc aactccttct acaagttgga agaagaagtt | 660 |
| atcgaatgga ccagaaagat ctggaacttg aaagttattg gtccaacctt gccatctatg | 720 |
| tacttggata agagattgga tgacgataag gacaacggtt tcaacttgta caaggctaac | 780 |
| catcatgaat gcatgaattg gttggacgac aagccaaaag aatccgttgt ttatgttgct | 840 |
| ttcggttctt tggtcaaaca tggtccagaa caagttgaag aaattaccag agccttgatc | 900 |
| gattccgatg ttaatttctt gtgggtcatc aagcacaaag aagaaggtaa attgccagaa | 960 |
| aacttgtccg aagttatcaa aactggtaag ggtttgattg tcgcttggtg taaacaattg | 1020 |
| gatgttttgg ctcatgaatc cgttggttgt ttcgttactc attgtggttt caactccacc | 1080 |
| ttggaagcta tttctttggg tgttccagtt gttgctatgc cacaattttc tgatcaaact | 1140 |
| accaacgcta agttgttgga cgaaattttg ggtgttggtg ttagagttaa ggctgacgaa | 1200 |
| aatggtatcg ttagaagagg taacttggct tcttgcatca agatgatcat ggaagaagaa | 1260 |
| agaggtgtca tcattagaaa gaacgctgtt aagtggaagg atttggctaa agttgctgtt | 1320 |
| catgaaggtg gtagttccga taatgatatc gttgaattcg tttccgaatt gatcaaggcc | 1380 |
| taa | 1383 |

SEQ ID NO: 161
Artificial Sequence

| | |
|---|---|
| MAEQQKIKKS PHVLLIPFPL QGHINPFIQF GKRLISKGVK TTLVTTIHTL NSTLNHSNTT | 60 |
| TTSIEIQAIS DGCDEGGFMS WGESYLETFK QVGSKSLADL IKKLQSEGTT IDAIIYDSMT | 120 |
| EWVLDVAIEF GIDGGSFFTQ ACVVNSLYYH VHKGLISLPL GETVSVPGFP VLQRWETPLI | 180 |
| LQNHEQIQSP WSQMLFGQFA NIDQARWVFT NSFYKLEEEV IEWTRKIWNL KVIGPTLPSM | 240 |
| YLDKRLDDDK DNGFNLYKAN HHECMNWLDD KPKESVVYVA FGSLVKHGPE QVEEITRALI | 300 |
| DSDVNFLWVI KHKEEGKLPE NLSEVIKTGK GLIVAWCKQL DVLAHESVGC FVTHCGFNST | 360 |
| LEAISLGVPV VAMPQFSDQT TNAKLLDEIL GVGVRVKADE NGIVRRGNLA SCIKMIMEEE | 420 |
| RGVIIRKNAV KWKDLAKVAV HEGGSSDNDI VEFVSELIKA | 460 |

SEQ ID NO: 162
Artificial Sequence

| | |
|---|---|
| atggctgaac aacaaaagat caagaagtct ccacacgttt tgttgattcc atttccattg | 60 |
| caaggtcaca tcaacccatt cattcaattc ggtaagagat tgatttccaa gggtgttaag | 120 |
| actactttgg ttactaccat ccataccttg aactctacct tgaaccattc taacactacc | 180 |
| accacctcca ttgaaattca agctatttcc gatggttgtg atgaaggtgg ttttatgtct | 240 |
| gctggtgaat cttacttgga aacctttaag caagttggtt ctaagtcctt ggccgatttg | 300 |
| attaagaagt tgcaatctga aggtactacc attgatgcca ttatctacga ttctatgacc | 360 |
| gaatgggttt tggatgttgc tattgaattc ggtattgatg gtggttcatt cttcactcaa | 420 |
| gcttgtgttg ttaactcctt gtactaccat gttcacaagg gtttgatctc attgccattg | 480 |
| ggtgaaactg tttctgttcc aggtttccca gttttacaaa gatgggaaac tccattgatc | 540 |
| ttgcaaaaca ctgaacaaat tcaatctcca tggtcccaaa tgttgtttgg tcaattcgcc | 600 |
| aacattgatc aagctagatg ggtttttacc aactccttct acaagttgga agaagaagtt | 660 |
| atcgaatgga ccagaaagat ctggaacttg aaagttattg gtccaacctt gccatctatg | 720 |
| tacttggata agagattgga tgacgataag gacaacggtt tcaacttgta caaggctaac | 780 |
| catcatgaat gcatgaattg gttggacgac aagccaaaag aatccgttgt ttatgttgct | 840 |
| ttcggttctt tggtcaaaca tggtccagaa caagttgaag aaattaccag agccttgatc | 900 |
| gattccgatg ttaatttctt gtgggtcatc aagcacaaag aagaaggtaa attgccagaa | 960 |
| aacttgtccg aagttatcaa aactggtaag ggtttgattg tcgcttggtg taaacaattg | 1020 |
| gatgttttgg ctcatgaatc cgttggttgt ttcgttactc attgtggttt caactccacc | 1080 |
| ttggaagcta tttctttggg tgttccagtt gttgctatgc cacaattttc tgatcaaact | 1140 |
| accaacgcta agttgttgga cgaaattttg ggtgttggtg ttagagttaa ggctgacgaa | 1200 |
| aatggtatcg ttagaagagg taacttggct tcttgcatca agatgatcat ggaagaagaa | 1260 |
| agaggtgtca tcattagaaa gaacgctgtt aagtggaagg atttggctaa agttgctgtt | 1320 |
| catgaaggtg gtagttccga taatgatatc gttgaattcg tttccgaatt gatcaaggcc | 1380 |
| taa | 1383 |

SEQ ID NO: 163
Artificial Sequence

| | |
|---|---|
| MAEQQKIKKS PHVLLIPFPL QGHINPFIQF GKRLISKGVK TTLVTTIHTL NSTLNHSNTT | 60 |
| TTSIEIQAIS DGCDEGGFMS AGESYLETFK QVGSKSLADL IKKLQSEGTT IDAIIYDSMT | 120 |
| EWVLDVAIEF GIDGGSFFTQ ACVVNSLYYH VHKGLISLPL GETVSVPGFP VLQRWETPLI | 180 |
| LQNTEQIQSP WSQMLFGQFA NIDQARWVFT NSFYKLEEEV IEWTRKIWNL KVIGPTLPSM | 240 |
| YLDKRLDDDK DNGFNLYKAN HHECMNWLDD KPKESVVYVA FGSLVKHGPE QVEEITRALI | 300 |
| DSDVNFLWVI KHKEEGKLPE NLSEVIKTGK GLIVAWCKQL DVLAHESVGC FVTHCGFNST | 360 |
| LEAISLGVPV VAMPQFSDQT TNAKLLDEIL GVGVRVKADE NGIVRRGNLA SCIKMIMEEE | 420 |
| RGVIIRKNAV KWKDLAKVAV HEGGSSDNDI VEFVSELIKA | 460 |

SEQ ID NO: 164
Artificial Sequence

| | |
|---|---|
| atggctgaac aacaaaagat caagaagtct ccacacgttt tgttgattcc atttccattg | 60 |
| caaggtcaca tcaacccatt cattcaattc ggtaagagat tgatttccaa gggtgttaag | 120 |
| actactttgg ttactaccat ccataccttg aactctacct tgaaccattc taacactacc | 180 |
| accacctcca ttgaaattca agctatttcc gatggttgtg atgaaggtgg ttttatgtct | 240 |
| gctggtgaat cttacttgga aacctttaag caagttggtt ctaagtcctt ggccgatttg | 300 |
| attaagaagt tgcaatctga aggtactacc attgatgcca ttatctacga ttctatgacc | 360 |
| gaatgggttt tggatgttgc tattgaattc ggtattgatg gtggttcatt cttcactcaa | 420 |
| gcttgtgttg ttaactcctt gtactaccat gttcacaagg gtttgatctc attgccattg | 480 |
| ggtgaaactg tttctgttcc aggtttccca gttttacaaa gatgggaaac tccattgatc | 540 |
| ttgcaaaacc acgaacaaat tcaatctcca tggtcccaaa tgttgtttgg tcaattcgcc | 600 |
| aacattgatc aagctagatg ggtttttacc aactccttct acaagttgga agaagaagtt | 660 |
| atcgaatgga ccagaaagat ctggaacttg aaagttattg gtccaacctt gccatctatg | 720 |
| tacttggata agagattgga tgacgataag gacaacggtt tcaacttgta caaggctaac | 780 |
| catcatgaat gcatgaattg gttggacgac aagccaaaag aatccgttgt ttatgttgct | 840 |
| ttcggttctt tggtcaatca tggtccagaa caagttgaag aaattaccag agccttgatc | 900 |
| gattccgatg ttaatttctt gtgggtcatc aagcacaaag aagaaggtaa attgccagaa | 960 |
| aacttgtccg aagttatcaa aactggtaag ggtttgattg tcgcttggtg taaacaattg | 1020 |
| gatgttttgg ctcatgaatc cgttggttgt ttcgttactc attgtggttt caactccacc | 1080 |
| ttggaagcta tttctttggg tgttccagtt gttgctatgc cacaattttc tgatcaaact | 1140 |
| accaacgcta agttgttgga cgaaattttg ggtgttggtg ttagagttaa ggctgacgaa | 1200 |
| aatggtatcg ttagaagagg taacttggct tcttgcatca agatgatcat ggaagaagaa | 1260 |
| agaggtgtca tcattagaaa gaacgctgtt aagtggaagg atttggctaa agttgctgtt | 1320 |
| catgaaggtg gtagttccga taatgatatc gttgaattcg tttccgaatt gatcaaggcc | 1380 |
| taa | 1383 |

SEQ ID NO: 165
Artificial Sequence

| | |
|---|---|
| MAEQQKIKKS PHVLLIPFPL QGHINPFIQF GKRLISKGVK TTLVTTIHTL NSTLNHSNTT | 60 |
| TTSIEIQAIS DGCDEGGFMS AGESYLETFK QVGSKSLADL IKKLQSEGTT IDAIIYDSMT | 120 |
| EWVLDVAIEF GIDGGSFFTQ ACVVNSLYYH VHKGLISLPL GETVSVPGFP VLQRWETPLI | 180 |
| LQNHEQIQSP WSQMLFGQFA NIDQARWVFT NSFYKLEEEV IEWTRKIWNL KVIGPTLPSM | 240 |
| YLDKRLDDDK DNGFNLYKAN HHECMNWLDD KPKESVVYVA FGSLVNHGPE QVEEITRALI | 300 |
| DSDVNFLWVI KHKEEGKLPE NLSEVIKTGK GLIVAWCKQL DVLAHESVGC FVTHCGFNST | 360 |
| LEAISLGVPV VAMPQFSDQT TNAKLLDEIL GVGVRVKADE NGIVRRGNLA SCIKMIMEEE | 420 |
| RGVIIRKNAV KWKDLAKVAV HEGGSSDNDI VEFVSELIKA | 460 |

SEQ ID NO: 166
Artificial Sequence

| | |
|---|---|
| atggctgaac aacaaaagat caagaagtct ccacacgttt tgttgattcc atttccattg | 60 |
| caaggtcaca tcaacccatt cattcaattc ggtaagagat tgatttccaa gggtgttaag | 120 |
| actactttgg ttactaccat ccataccttg aactctacct tgaaccattc taacactacc | 180 |
| accacctcca ttgaaattca agctatttcc gatggttgtg atgaaggtgg ttttgaatct | 240 |
| gctggtgaat cttacttgga aacctttaag caagttggtt ctaagtcctt ggccgatttg | 300 |
| attaagaagt tgcaatctga aggtactacc attgatgcca ttatctacga ttctatgacc | 360 |
| gaatgggttt tggatgttgc tattgaattc ggtattgatg gtggttcatt cttcactcaa | 420 |
| gcttgtgttg ttaactcctt gtactaccat gttcacaagg gtttgatctc attgccattg | 480 |
| ggtgaaactg tttctgttcc aggtttccca gttttacaaa gatgggaaac tccattgatc | 540 |
| ttgcaaaacc acgaacaaat tcaatctcca tggtcccaaa tgttgtttgg tcaattcgcc | 600 |
| aacattgatc aagctagatg ggtttttacc aactccttct acaagttgga agaagaagtt | 660 |
| atcgaatgga ccagaaagat ctggaacttg aaagttattg gtccaacctt gccatctatg | 720 |
| tacttggata agagattgga tgacgataag gacaacggtt tcaacttgta caaggctaac | 780 |
| catcatgaat gcatgaattg gttggacgac aagccaaaag aatccgttgt ttatgttgct | 840 |
| ttcggttctt tggtcaaaca tggtccagaa caagttgaag aaattaccag agccttgatc | 900 |
| gattccgatg ttaatttctt gtgggtcatc aagcacaaag aagaaggtaa attgccagaa | 960 |
| aacttgtccg aagttatcaa aactggtaag ggtttgattg tcgcttggtg taaacaattg | 1020 |
| gatgttttgg ctcatgaatc cgttggttgt ttcgttactc attgtggttt caactccacc | 1080 |
| ttggaagcta tttctttggg tgttccagtt gttgctatgc cacaattttc tgatcaaact | 1140 |
| accaacgcta agttgttgga cgaaattttg ggtgttggtg ttagagttaa ggctgacgaa | 1200 |
| aatggtatcg ttagaagagg taacttggct tcttgcatca agatgatcat ggaagaagaa | 1260 |
| agaggtgtca tcattagaaa gaacgctgtt aagtggaagg atttggctaa agttgctgtt | 1320 |
| catgaaggtg gtagttccga taatgatatc gttgaattcg tttccgaatt gatcaaggcc | 1380 |
| taa | 1383 |

SEQ ID NO: 167
Artificial Sequence

| | |
|---|---|
| MAEQQKIKKS PHVLLIPFPL QGHINPFIQF GKRLISKGVK TTLVTTIHTL NSTLNHSNTT | 60 |
| TTSIEIQAIS DGCDEGGFES AGESYLETFK QVGSKSLADL IKKLQSEGTT IDAIIYDSMT | 120 |
| EWVLDVAIEF GIDGGSFFTQ ACVVNSLYYH VHKGLISLPL GETVSVPGFP VLQRWETPLI | 180 |
| LQNHEQIQSP WSQMLFGQFA NIDQARWVFT NSFYKLEEEV IEWTRKIWNL KVIGPTLPSM | 240 |
| YLDKRLDDDK DNGFNLYKAN HHECMNWLDD KPKESVVYVA FGSLVKHGPE QVEEITRALI | 300 |
| DSDVNFLWVI KHKEEGKLPE NLSEVIKTGK GLIVAWCKQL DVLAHESVGC FVTHCGFNST | 360 |
| LEAISLGVPV VAMPQFSDQT TNAKLLDEIL GVGVRVKADE NGIVRRGNLA SCIKMIMEEE | 420 |
| RGVIIRKNAV KWKDLAKVAV HEGGSSDNDI VEFVSELIKA | 460 |

SEQ ID NO: 168
Artificial Sequence

| | |
|---|---|
| atggctgaac aacaaaagat caagaagtct ccacacgttt tgttgattcc atttccattg | 60 |
| caaggtcaca tcaacccatt cattcaattc ggtaagagat tgatttccaa gggtgttaag | 120 |
| actactttgg ttactaccat ccataccttg aactctacct tgaaccattc taacactacc | 180 |
| accacctcca ttgaaattca agctatttcc gatggttgtg atgaaggtgg ttttatgtct | 240 |
| gctggtgaat cttacttgga aacctttaag caagttggtt ctaagtcctt ggccgatttg | 300 |
| attaagaagt tgcaatctga aggtactacc attgatgcca ttatctacga ttctatgacc | 360 |
| gaatgggttt tggatgttgc tattgaattc ggtattgatg gtggttcatt cttcactcaa | 420 |
| gcttgtgttg ttaactcctt gtactaccat gttcacaagg gtttgatctc attgccattg | 480 |
| ggtgaaactg tttctgttcc aggtttccca gttttacaaa gatgggaaac tccattgatc | 540 |
| ttgcaaaacc acgaacaaat tcaatctcca tggtcccaaa tgttgtttgg tcaattcgcc | 600 |
| aacattgatc aagctagatg ggtttttacc aactccttct acaagttgga agaagaagtt | 660 |
| atcgaatgga ccagaaagat ctggaacttg aaagttattg gtccaacctt gccatctatg | 720 |
| tacttggata agagattgga tgacgataag gacaacggtt tcaacttgta caaggctaac | 780 |
| catcatgaat gcatgaattg gttggacgac aagccaaaag aatccgttgt ttatgttgct | 840 |
| ttcggttctt tggtcactca tggtccagaa caagttgaag aaattaccag agccttgatc | 900 |
| gattccgatg ttaatttctt gtgggtcatc aagcacaaag aagaaggtaa attgccagaa | 960 |
| aacttgtccg aagttatcaa aactggtaag ggtttgattg tcgcttggtg taaacaattg | 1020 |
| gatgttttgg ctcatgaatc cgttggttgt ttcgttactc attgtggttt caactccacc | 1080 |
| ttggaagcta tttctttggg tgttccagtt gttgctatgc cacaattttc tgatcaaact | 1140 |
| accaacgcta agttgttgga cgaaattttg ggtgttggtg ttagagttaa ggctgacgaa | 1200 |
| aatggtatcg ttagaagagg taacttggct tcttgcatca agatgatcat ggaagaagaa | 1260 |
| agaggtgtca tcattagaaa gaacgctgtt aagtggaagg atttggctaa agttgctgtt | 1320 |
| catgaaggtg gtagttccga taatgatatc gttgaattcg tttccgaatt gatcaaggcc | 1380 |
| taa | 1383 |

SEQ ID NO: 169
Artificial Sequence

| | |
|---|---|
| MAEQQKIKKS PHVLLIPFPL QGHINPFIQF GKRLISKGVK TTLVTTIHTL NSTLNHSNTT | 60 |
| TTSIEIQAIS DGCDEGGFMS AGESYLETFK QVGSKSLADL IKKLQSEGTT IDAIIYDSMT | 120 |
| EWVLDVAIEF GIDGGSFFTQ ACVVNSLYYH VHKGLISLPL GETVSVPGFP VLQRWETPLI | 180 |
| LQNHEQIQSP WSQMLFGQFA NIDQARWVFT NSFYKLEEEV IEWTRKIWNL KVIGPTLPSM | 240 |
| YLDKRLDDDK DNGFNLYKAN HHECMNWLDD KPKESVVYVA FGSLVTHGPE QVEEITRALI | 300 |
| DSDVNFLWVI KHKEEGKLPE NLSEVIKTGK GLIVAWCKQL DVLAHESVGC FVTHCGFNST | 360 |
| LEAISLGVPV VAMPQFSDQT TNAKLLDEIL GVGVRVKADE NGIVRRGNLA SCIKMIMEEE | 420 |
| RGVIIRKNAV KWKDLAKVAV HEGGSSDNDI VEFVSELIKA | 460 |

SEQ ID NO: 170
Artificial Sequence

| | |
|---|---|
| gcacacacca tagcttcaaa atgtttctac tcctttttta ctcttccaga ttttctcgga | 60 |
| ctccgcgcat cgccgtacca cttcaaaaca cccaagcaca gcatactaaa tttcccctct | 120 |
| ttcttcctct agggtgtcgt taattacccg tactaaaggt ttggaaaaga aaaaagagac | 180 |
| cgcctcgttt ctttttcttc gtcgaaaaag gcaataaaaa tttttatcac gtttcttttt | 240 |
| cttgaaaatt tttttttttg atttttttct ctttcgatga cctcccattg atatttaagt | 300 |
| taataaacgg tcttcaattt ctcaagtttc agtttcattt ttcttgttct attacaactt | 360 |
| tttttacttc ttgctcatta gaaagaaagc atagcaatct aatctaagtt ttaattacaa | 420 |

SEQ ID NO: 171
Artificial Sequence

| | |
|---|---|
| gtagatacgt tgttgacact tctaaataag cgaatttctt atgatttatg atttttatta | 60 |
| ttaaataagt tataaaaaaa ataagtgtat acaaatttta aagtgactct taggttttaa | 120 |
| aacgaaaatt cttattcttg agtaactctt tcctgtaggt caggttgctt tctcaggtat | 180 |
| agcatgaggt cgctc | 195 |

SEQ ID NO: 172
Artificial Sequence

| | |
|---|---|
| gaaggtaaat cctctggctc aggtagcgag tctaaaagta cc | 42 |

SEQ ID NO: 173
Artificial Sequence

| | |
|---|---|
| atgaaagcgc aatatgaaga tggaaagcag tatacgacct tagaaaaacc agtcgctgga | 60 |
| gctccgcaag tcttggaatt ctttagtttt ttttgtccgc attgttacca gtttgaggaa | 120 |
| gtcttgcata tatccgacaa cgtcaaaaag aagttgccag aaggcgttaa aatgacgaaa | 180 |
| tatcacgtta actttatggg aggtgacttg ggaaaagatc ttactcaagc ctgggccgtt | 240 |
| gcaatggcat tgggagttga agataaagtt acagtgccct tgtttgaagg agttcaaaag | 300 |
| acccagacta taaggtcagc ctccgacatt agagacgtct ttatcaatgc tgggattaag | 360 |
| ggcgaagagt atgatgccgc gtggaactcc tttgttgtca agagtttagt cgcacaacaa | 420 |
| gaaaaggctg ctgcagacgt tcagttaagg ggtgtgccag ccatgttcgt taatggtaag | 480 |
| tatcagttaa atccacaggg gatggataca tcaaacatgg atgtgttcgt gcaacagtac | 540 |
| gcagacactg ttaaatattt gtcagagaag aaagaaggta aatcctctgg ctcaggtagc | 600 |
| gagtctaaaa gtaccatggc tgaacaacaa aagatcaaga agtctccaca cgttttgttg | 660 |
| attccatttc cattgcaagg tcacatcaac ccattcattc aattcggtaa gagattgatt | 720 |
| tccaagggtg ttaagactac tttggttact accatccata ccttgaactc taccttgaac | 780 |
| cattctaaca ctaccaccac ctccattgaa attcaagcta tttccgatgg ttgtgatgaa | 840 |
| ggtggtttta tgtctgctgg tgaatcttac ttggaaacct ttaagcaagt tggttctaag | 900 |
| tccttggccg atttgattaa gaagttgcaa tctgaaggta ctaccattga tgccattatc | 960 |
| tacgattcta tgaccgaatg ggttttggat gttgctattg aattcggtat tgatggtggt | 1020 |
| tcattcttca ctcaagcttg tgttgttaac tccttgtact accatgttca caagggtttg | 1080 |
| atctcattgc cattgggtga aactgtttct gttccaggtt tcccagtttt acaaagatgg | 1140 |
| gaaactccat tgatcttgca aaaccacgaa caaattcaat ctccatggtc ccaaatgttg | 1200 |
| tttggtcaat tcgccaacat tgatcaagct agatgggttt ttaccaactc cttctacaag | 1260 |
| ttggaagaag aagttatcga atggaccaga aagatctgga acttgaaagt tattggtcca | 1320 |
| accttgccat ctatgtactt ggataagaga ttggatgacg ataaggacaa cggtttcaac | 1380 |
| ttgtacaagg ctaaccatca tgaatgcatg aattggttgg acgacaagcc aaaagaatcc | 1440 |
| gttgtttatg ttgctttcgg ttctttggtc aaacatggtc cagaacaagt tgaagaaatt | 1500 |
| accagagcct tgatcgattc cgatgttaat ttcttgtggg tcatcaagca caaagaagaa | 1560 |
| ggtaaattgc cagaaaactt gtccgaagtt atcaaaactg gtaagggttt gattgtcgct | 1620 |
| tggtgtaaac aattggatgt tttggctcat gaatccgttg gttgtttcgt tactcattgt | 1680 |
| ggtttcaact ccaccttgga agctatttct ttgggtgttc cagttgttgc tatgccacaa | 1740 |
| ttttctgatc aaactaccaa cgctaagttg ttggacgaaa ttttgggtgt tggtgttaga | 1800 |
| gttaaggctg acgaaaatgg tatcgttaga agaggtaact tggcttcttg catcaagatg | 1860 |
| atcatggaag aagaaagagg tgtcatcatt agaaagaacg ctgttaagtg gaaggatttg | 1920 |
| gctaaagttg ctgttcatga aggtggtagt tccgataatg atatcgttga attcgtttcc | 1980 |
| gaattgatca aggcctaa | 1998 |

SEQ ID NO: 174
Artificial Sequence

| | |
|---|---|
| MKAQYEDGKQ YTTLEKPVAG APQVLEFFSF FCPHCYQFEE VLHISDNVKK KLPEGVKMTK | 60 |
| YHVNFMGGDL GKDLTQAWAV AMALGVEDKV TVPLFEGVQK TQTIRSASDI RDVFINAGIK | 120 |
| GEEYDAAWNS FVVKSLVAQQ EKAAADVQLR GVPAMFVNGK YQLNPQGMDT SNMDVFVQQY | 180 |
| ADTVKYLSEK KEGKSSGSGS ESKSTMAEQQ KIKKSPHVLL IPFPLQGHIN PFIQFGKRLI | 240 |
| SKGVKTTLVT TIHTLNSTLN HSNTTTTSIE IQAISDGCDE GGFMSAGESY LETFKQVGSK | 300 |
| SLADLIKKLQ SEGTTIDAII YDSMTEWVLD VAIEFGIDGG SFFTQACVVN SLYYHVHKGL | 360 |
| ISLPLGETVS VPGFPVLQRW ETPLILQNHE QIQSPWSQML FGQFANIDQA RWVFTNSFYK | 420 |
| LEEEVIEWTR KIWNLKVIGP TLPSMYLDKR LDDDKDNGFN LYKANHHECM NWLDDKPKES | 480 |
| VVYVAFGSLV KHGPEQVEEI TRALIDSDVN FLWVIKHKEE GKLPENLSEV IKTGKGLIVA | 540 |
| WCKQLDVLAH ESVGCFVTHC GFNSTLEAIS LGVPVVAMPQ FSDQTTNAKL LDEILGVGVR | 600 |
| VKADENGIVR RGNLASCIKM IMEEERGVII RKNAVKWKDL AKVAVHEGGS SDNDIVEFVS | 660 |
| ELIKA | 665 |

SEQ ID NO: 175
Artificial Sequence

| | |
|---|---|
| atgaaaacag aagaagggaa attggttata tggataaacg gtgataaggg ctataacgga | 60 |
| ttagccgagg taggtaagaa gtttgaaaaa gatactggta taaaagttac tgttgaacat | 120 |
| ccggacaaac tggaagaaaa atttcctcaa gttgctgcaa ctggcgatgg tccagatata | 180 |
| atcttctggg cacatgacag attcggcggt tacgcacagt ccggattgct ggctgagatc | 240 |
| acccctgaca aggcgttcca agataagcta taccctttta catgggacgc agtgagatac | 300 |
| aatggaaaat tgattgctta cccaattgca gttgaggcac tgtctctgat ttacaataag | 360 |
| gacttgctac caaaccctcc aaaaacctgg gaagaaatcc cagccctgga caaagaacta | 420 |
| aaagctaaag gaaaatccgc cttgatgttt aacttgcaag agccttattt cacatggccg | 480 |
| ctaattgctg cagatggcgg ttatgctttt aaatatgaaa acggtaagta tgacatcaaa | 540 |
| gatgttggag tcgacaatgc aggtgctaag gccggcttaa ctttcttagt ggacttaatc | 600 |
| aagaataagc atatgaatgc agacactgat tacagcatag cggaggctgc tttcaacaaa | 660 |
| ggtgaaacag ctatgacaat aaatggccct tgggcctggt ctaatatcga cacgtctaaa | 720 |
| gttaattatg gggtaacagt acttccaacg tttaaaggcc agccatcaaa gccctttgta | 780 |
| ggtgtcctga gtgccggtat taacgcagcc agcccgaaca aagagttagc gaaagaattc | 840 |
| ttagaaaatt atttactgac cgatgagggt cttgaagcag tgaacaagga taaacctttg | 900 |
| ggtgcagtcg ctttgaagag ttacgaagaa gaactggcta aggaccccag aattgcagcc | 960 |
| actatggaaa atgcccaaaa gggagaaatt atgccaaata tacctcaaat gtcagccttc | 1020 |
| tggtatgcgg ttaggactgc cgttataaac gctgctagtg gaaggcagac ggtggatgaa | 1080 |
| gcacttaaag atgcgcagac agaaggtaaa tcctctggct caggtagcga gtctaaaagt | 1140 |
| accatggctg aacaacaaaa gatcaagaag tctccacacg ttttgttgat tccatttcca | 1200 |
| ttgcaaggtc acatcaaccc attcattcaa ttcggtaaga gattgatttc caagggtgtt | 1260 |
| aagactactt tggttactac catccatacc ttgaactcta ccttgaacca ttctaacact | 1320 |
| accaccacct ccattgaaat tcaagctatt tccgatggtt gtgatgaagg tggttttatg | 1380 |
| tctgctggtg aatcttactt ggaaaccttt aagcaagttg gttctaagtc cttggccgat | 1440 |
| ttgattaaga agttgcaatc tgaaggtact accattgatg ccattatcta cgattctatg | 1500 |
| accgaatggg ttttggatgt tgctattgaa ttcggtattg atggtggttc attcttcact | 1560 |
| caagcttgtg ttgttaactc cttgtactac catgttcaca agggtttgat ctcattgcca | 1620 |
| ttgggtgaaa ctgtttctgt tccaggtttc ccagttttac aaagatggga aactccattg | 1680 |
| atcttgcaaa accacgaaca aattcaatct ccatggtccc aaatgttgtt tggtcaattc | 1740 |
| gccaacattg atcaagctag atgggttttt accaactcct tctacaagtt ggaagaagaa | 1800 |
| gttatcgaat ggaccagaaa gatctggaac ttgaaagtta ttggtccaac cttgccatct | 1860 |
| atgtacttgg ataagagatt ggatgacgat aaggacaacg gtttcaactt gtacaaggct | 1920 |
| aaccatcatg aatgcatgaa ttggttggac gacaagccaa aagaatccgt tgtttatgtt | 1980 |
| gctttcggtt ctttggtcaa acatggtcca gaacaagttg aagaaattac cagagccttg | 2040 |
| atcgattccg atgttaattt cttgtgggtc atcaagcaca aagaagaagg taaattgcca | 2100 |
| gaaaacttgt ccgaagttat caaaactggt aagggtttga ttgtcgcttg gtgtaaacaa | 2160 |
| ttggatgttt tggctcatga atccgttggt tgtttcgtta ctcattgtgg tttcaactcc | 2220 |
| accttggaag ctatttcttt gggtgttcca gttgttgcta tgccacaatt ttctgatcaa | 2280 |
| actaccaacg ctaagttgtt ggacgaaatt ttgggtgttg gtgttagagt taaggctgac | 2340 |
| gaaaatggta tcgttagaag aggtaacttg gcttcttgca tcaagatgat catggaagaa | 2400 |
| gaaagaggtg tcatcattag aaagaacgct gttaagtgga aggatttggc taaagttgct | 2460 |
| gttcatgaag gtggtagttc cgataatgat atcgttgaat tcgtttccga attgatcaag | 2520 |
| gcctaa | 2526 |

SEQ ID NO: 176
Artificial Sequence

| | |
|---|---|
| MKTEEGKLVI WINGDKGYNG LAEVGKKFEK DTGIKVTVEH PDKLEEKFPQ VAATGDGPDI | 60 |
| IFWAHDRFGG YAQSGLLAEI TPDKAFQDKL YPFTWDAVRY NGKLIAYPIA VEALSLIYNK | 120 |
| DLLPNPPKTW EEIPALDKEL KAKGKSALMF NLQEPYFTWP LIAADGGYAF KYENGKYDIK | 180 |
| DVGVDNAGAK AGLTFLVDLI KNKHMNADTD YSIAEAAFNK GETAMTINGP WAWSNIDTSK | 240 |
| VNYGVTVLPT FKGQPSKPFV GVLSAGINAA SPNKELAKEF LENYLLTDEG LEAVNKDKPL | 300 |
| GAVALKSYEE ELAKDPRIAA TMENAQKGEI MPNIPQMSAF WYAVRTAVIN AASGRQTVDE | 360 |
| ALKDAQTEGK SSGSGSESKS TMAEQQKIKK SPHVLLIPFP LQGHINPFIQ FGKRLISKGV | 420 |
| KTTLVTTIHT LNSTLNHSNT TTTSIEIQAI SDGCDEGGFM SAGESYLETF KQVGSKSLAD | 480 |
| LIKKLQSEGT TIDAIIYDSM TEWVLDVAIE FGIDGGSFFT QACVVNSLYY HVHKGLISLP | 540 |
| LGETVSVPGF PVLQRWETPL ILQNHEQIQS PWSQMLFGQF ANIDQARWVF TNSFYKLEEE | 600 |
| VIEWTRKIWN LKVIGPTLPS MYLDKRLDDD KDNGFNLYKA NHHECMNWLD DKPKESVVYV | 660 |
| AFGSLVKHGP EQVEEITRAL IDSDVNFLWV IKHKEEGKLP ENLSEVIKTG KGLIVAWCKQ | 720 |
| LDVLAHESVG CFVTHCGFNS TLEAISLGVP VVAMPQFSDQ TTNAKLLDEI LGVGVRVKAD | 780 |
| ENGIVRRGNL ASCIKMIMEE ERGVIIRKNA VKWKDLAKVA VHEGGSSDND IVEFVSELIK | 840 |
| A | 841 |

SEQ ID NO: 177
Artificial Sequence

| | |
|---|---|
| atgaataagg agattctagc agtcgttgaa gcagtaagta acgaaaaagc attgcctagg | 60 |
| gagaaaatct tcgaagccct agaaagcgct ttggccacag ccacgaaaaa gaagtacgag | 120 |
| caagaaattg acgttagagt tcagatcgac aggaaatcag gtgatttcga tacatttagg | 180 |
| agatggttag tagtagatga ggttacacag cctactaagg agattacatt agaggcggcc | 240 |
| agatacgaag acgaatcttt gaacttaggg gactatgttg aggatcaaat tgaatcagtt | 300 |
| acttttgata gaattacaac tcaaacagcc aaacaagtca tagttcaaaa agtgagggaa | 360 |
| gccgaaagag caatggtggt cgaccaattt cgtgagcacg aaggagagat cataacaggt | 420 |
| gtcgttaaaa aggttaatag agataatatt tctttggatc ttgggaataa tgccgaagct | 480 |
| gttatcctga gggaagatat gttgccgagg gaaaatttca gacctggaga tcgtgtcaga | 540 |
| ggtgttttgt attctgtacg tccagaggca agaggagctc aattatttgt tactcgttct | 600 |
| aaaccggaga tgcttattga actatttagg attgaggtgc ctgaaattgg agaagaagtt | 660 |
| attgagatca aagccgctgc acgtgatcca ggatcaagag cgaagattgc tgttaaaaca | 720 |
| aatgataaac gtatcgatcc cgtgggtgcg tgtgttggta tgaggggtgc tagagtccag | 780 |
| gctgtaagca ccgaactggg aggcgagagg attgacattg tcttgtggga cgataatcct | 840 |
| gcccagtttg taataaacgc aatggctcct gctgatgtgg cctctatagt cgtggatgag | 900 |
| gacaaacata ccatggatat agcagtagaa gctggtaatt tagcccaagc aattggaaga | 960 |
| aacggtcaaa acgtccgttt agcttcccag ttgtctggtt gggaactgaa cgtgatgacg | 1020 |
| gttgatgatt tacaagctaa gcaccaagca gaggctcatg cagcgattga taccttcact | 1080 |
| aaatatctag atatagacga ggattttgca actgtgcttg ttgaagaagg cttttctacg | 1140 |
| ttagaagaac tagcttacgt cccaatgaag gaattattag aaatcgaggg tttggatgaa | 1200 |
| cctacagtgg aggctttgag agaaagggcc aagaatgccc tagcaactat agctcaagca | 1260 |
| caagaggaat cactgggaga taataagcct gcagacgatt tgctgaacct agaaggtgta | 1320 |
| gatagggact tggcttttaa gctagcagcc agaggcgtgt gtacactaga ggatttggct | 1380 |
| gaacaaggaa tagatgacct agctgacatt gaagggttga cagatgaaaa agctggggcc | 1440 |
| ttaataatgg ccgctaggaa tatttgctgg ttcggggatg aggcagaagg taaatcctct | 1500 |
| ggctcaggta gcgagtctaa aagtaccatg gctgaacaac aaaagatcaa gaagtctcca | 1560 |
| cacgttttgt tgattccatt tccattgcaa ggtcacatca acccattcat tcaattcggt | 1620 |
| aagagattga tttccaaggg tgttaagact actttggtta ctaccatcca taccttgaac | 1680 |
| tctaccttga accattctaa cactaccacc acctccattg aaattcaagc tatttccgat | 1740 |
| ggttgtgatg aaggtggttt tatgtctgct ggtgaatctt acttggaaac ctttaagcaa | 1800 |
| gttggttcta agtccttggc cgatttgatt aagaagttgc aatctgaagg tactaccatt | 1860 |
| gatgccatta tctacgattc tatgaccgaa tgggttttgg atgttgctat tgaattcggt | 1920 |
| attgatggtg gttcattctt cactcaagct tgtgttgtta actccttgta ctaccatgtt | 1980 |
| cacaagggtt tgatctcatt gccattgggt gaaactgttt ctgttccagg tttcccagtt | 2040 |
| ttacaaagat gggaaactcc attgatcttg caaaaccacg aacaaattca atctccatgg | 2100 |
| tcccaaatgt tgtttggtca attcgccaac attgatcaag ctagatgggt ttttaccaac | 2160 |
| tccttctaca agttggaaga agaagttatc gaatggacca gaaagatctg gaacttgaaa | 2220 |
| gttattggtc caaccttgcc atctatgtac ttggataaga gattggatga cgataaggac | 2280 |
| aacggtttca acttgtacaa ggctaaccat catgaatgca tgaattggtt ggacgacaag | 2340 |
| ccaaaagaat ccgttgttta tgttgctttc ggttctttgg tcaaacatgg tccagaacaa | 2400 |
| gttgaagaaa ttaccagagc cttgatcgat tccgatgtta atttcttgtg ggtcatcaag | 2460 |
| cacaaagaag aaggtaaatt gccagaaaac ttgtccgaag ttatcaaaac tggtaagggt | 2520 |
| ttgattgtcg cttggtgtaa acaattggat gttttggctc atgaatccgt tggttgtttc | 2580 |
| gttactcatt gtggtttcaa ctccaccttg gaagctattt ctttgggtgt tccagttgtt | 2640 |
| gctatgccac aattttctga tcaaactacc aacgctaagt tgttggacga aattttgggt | 2700 |
| gttggtgtta gagttaaggc tgacgaaaat ggtatcgtta gaagaggtaa cttggcttct | 2760 |
| tgcatcaaga tgatcatgga agaagaaaga ggtgtcatca ttagaaagaa cgctgttaag | 2820 |
| tggaaggatt tggctaaagt tgctgttcat gaaggtggta gttccgataa tgatatcgtt | 2880 |
| gaattcgttt ccgaattgat caaggcctaa | 2910 |

SEQ ID NO: 178
Artificial Sequence

| | |
|---|---|
| MNKEILAVVE AVSNEKALPR EKIFEALESA LATATKKKYE QEIDVRVQID RKSGDFDTFR | 60 |
| RWLVVDEVTQ PTKEITLEAA RYEDESLNLG DYVEDQIESV TFDRITTQTA KQVIVQKVRE | 120 |
| AERAMVVDQF REHEGEIITG VVKKVNRDNI SLDLGNNAEA VILREDMLPR ENFRPGDRVR | 180 |
| GVLYSVRPEA RGAQLFVTRS KPEMLIELFR IEVPEIGEEV IEIKAAARDP GSRAKIAVKT | 240 |
| NDKRIDPVGA CVGMRGARVQ AVSTELGGER IDIVLWDDNP AQFVINAMAP ADVASIVVDE | 300 |
| DKHTMDIAVE AGNLAQAIGR NGQNVRLASQ LSGWELNVMT VDDLQAKHQA EAHAAIDTFT | 360 |
| KYLDIDEDFA TVLVEEGFST LEELAYVPMK ELLEIEGLDE PTVEALRERA KNALATIAQA | 420 |
| QEESLGDNKP ADDLLNLEGV DRDLAFKLAA RGVCTLEDLA EQGIDDLADI EGLTDEKAGA | 480 |
| LIMAARNICW FGDEAEGKSS GSGSESKSTM AEQQKIKKSP HVLLIPFPLQ GHINPFIQFG | 540 |
| KRLISKGVKT TLVTTIHTLN STLNHSNTTT TSIEIQAISD GCDEGGFMSA GESYLETFKQ | 600 |
| VGSKSLADLI KKLQSEGTTI DAIIYDSMTE WVLDVAIEFG IDGGSFFTQA CVVNSLYYHV | 660 |
| HKGLISLPLG ETVSVPGFPV LQRWETPLIL QNHEQIQSPW SQMLFGQFAN IDQARWVFTN | 720 |
| SFYKLEEEVI EWTRKIWNLK VIGPTLPSMY LDKRLDDDKD NGFNLYKANH HECMNWLDDK | 780 |
| PKESVVYVAF GSLVKHGPEQ VEEITRALID SDVNFLWVIK HKEEGKLPEN LSEVIKTGKG | 840 |
| LIVAWCKQLD VLAHESVGCF VTHCGFNSTL EAISLGVPVV AMPQFSDQTT NAKLLDEILG | 900 |
| VGVRVKADEN GIVRRGNLAS CIKMIMEEER GVIIRKNAVK WKDLAKVAVH EGGSSDNDIV | 960 |
| EFVSELIKA | 969 |

SEQ ID NO: 179
Artificial Sequence

| | |
|---|---|
| atgagtgact ctgaagtgaa tcaagaggct aaaccagaag taaagcccga agtaaagcca | 60 |
| gagacccaca tcaacttgaa ggtttcagac gggtcttcag agatattctt taaaatcaaa | 120 |
| aagacaacgc ccttgagaag gctaatggaa gcgtttgcca agagacaagg aaaagaaatg | 180 |
| gatagtttaa ctttcttgta cgatgggatt gagattcaag cagatcaaac tccggaagat | 240 |
| ttggacatgg aagataatga tatcattgaa gctcatagag aacaaatcgg aggtgaaggt | 300 |
| aaatcctctg gctcaggtag cgagtctaaa agtaccatgg ctgaacaaca aaagatcaag | 360 |
| aagtctccac acgttttgtt gattccattt ccattgcaag gtcacatcaa cccattcatt | 420 |
| caattcggta agagattgat ttccaagggt gttaagacta ctttggttac taccatccat | 480 |
| accttgaact ctaccttgaa ccattctaac actaccacca cctccattga aattcaagct | 540 |
| atttccgatg gttgtgatga aggtggtttt atgtctgctg gtgaatctta cttggaaacc | 600 |
| tttaagcaag ttggttctaa gtccttggcc gatttgatta agaagttgca atctgaaggt | 660 |
| actaccattg atgccattat ctacgattct atgaccgaat gggttttgga tgttgctatt | 720 |
| gaattcggta ttgatggtgg ttcattcttc actcaagctt gtgttgttaa ctccttgtac | 780 |
| taccatgttc acaagggttt gatctcattg ccattgggtg aaactgtttc tgttccaggt | 840 |
| ttcccagttt tacaaagatg ggaaactcca ttgatcttgc aaaaccacga acaaattcaa | 900 |
| tctccatggt cccaaatgtt gtttggtcaa ttcgccaaca ttgatcaagc tagatgggtt | 960 |
| tttaccaact ccttctacaa gttggaagaa gaagttatcg aatggaccag aaagatctgg | 1020 |
| aacttgaaag ttattggtcc aaccttgcca tctatgtact tggataagag attggatgac | 1080 |
| gataaggaca acggtttcaa cttgtacaag gctaaccatc atgaatgcat gaattggttg | 1140 |
| gacgacaagc caaaagaatc cgttgtttat gttgctttcg gttctttggt caaacatggt | 1200 |
| ccagaacaag ttgaagaaat taccagagcc ttgatcgatt ccgatgttaa tttcttgtgg | 1260 |
| gtcatcaagc acaaagaaga aggtaaattg ccagaaaact tgtccgaagt tatcaaaact | 1320 |
| ggtaagggtt tgattgtcgc ttggtgtaaa caattggatg ttttggctca tgaatccgtt | 1380 |
| ggttgtttcg ttactcattg tggtttcaac tccaccttgg aagctatttc tttgggtgtt | 1440 |
| ccagttgttg ctatgccaca attttctgat caaactacca acgctaagtt gttggacgaa | 1500 |
| attttgggtg ttggtgttag agttaaggct gacgaaaatg gtatcgttag aagaggtaac | 1560 |
| ttggcttctt gcatcaagat gatcatggaa gaagaaagag gtgtcatcat tagaaagaac | 1620 |
| gctgttaagt ggaaggattt ggctaaagtt gctgttcatg aaggtggtag ttccgataat | 1680 |
| gatatcgttg aattcgtttc cgaattgatc aaggcctaa | 1719 |

SEQ ID NO: 180
Artificial Sequence

| | |
|---|---|
| MSDSEVNQEA KPEVKPEVKP ETHINLKVSD GSSEIFFKIK KTTPLRRLME AFAKRQGKEM | 60 |
| DSLTFLYDGI EIQADQTPED LDMEDNDIIE AHREQIGGEG KSSGSGSESK STMAEQQKIK | 120 |
| KSPHVLLIPF PLQGHINPFI QFGKRLISKG VKTTLVTTIH TLNSTLNHSN TTTTSIEIQA | 180 |
| ISDGCDEGGF MSAGESYLET FKQVGSKSLA DLIKKLQSEG TTIDAIIYDS MTEWVLDVAI | 240 |
| EFGIDGGSFF TQACVVNSLY YHVHKGLISL PLGETVSVPG FPVLQRWETP LILQNHEQIQ | 300 |
| SPWSQMLFGQ FANIDQARWV FTNSFYKLEE EVIEWTRKIW NLKVIGPTLP SMYLDKRLDD | 360 |
| DKDNGFNLYK ANHHECMNWL DDKPKESVVY VAFGSLVKHG PEQVEEITRA LIDSDVNFLW | 420 |
| VIKHKEEGKL PENLSEVIKT GKGLIVAWCK QLDVLAHESV GCFVTHCGFN STLEAISLGV | 480 |
| PVVAMPQFSD QTTNAKLLDE ILGVGVRVKA DENGIVRRGN LASCIKMIME EERGVIIRKN | 540 |
| AVKWKDLAKV AVHEGGSSDN DIVEFVSELI KA | 572 |

SEQ ID NO: 181
Saccharomyces cerevisiae

| | |
|---|---|
| atgtctagtc aaacagaaag aacttttatt gcggtaaaac cagatggtgt ccagaggggc | 60 |
| ttagtatctc aaattctatc tcgttttgaa aaaaaaggtt acaaactagt tgctattaaa | 120 |
| ttagttaaag cggatgataa attactagag caacattacg cagagcatgt tggtaaacca | 180 |
| tttttcccaa agatggtatc ctttatgaag tctggtccca ttttggccac ggtctgggag | 240 |
| ggaaaagatg tggttagaca aggaagaact attcttggtg ctactaatcc tttgggcagt | 300 |
| gcaccaggta ccattagagg tgatttcggt attgacctag gcagaaacgt ctgtcacggc | 360 |
| agtgattctg ttgatagcgc tgaacgtgaa atcaatttgt ggtttaagaa ggaagagtta | 420 |
| gttgattggg aatctaatca agctaagtgg atttatgaat ga | 462 |

SEQ ID NO: 182
Saccharomyces cerevisiae

| | |
|---|---|
| MSSQTERTFI AVKPDGVQRG LVSQILSRFE KKGYKLVAIK LVKADDKLLE QHYAEHVGKP | 60 |
| FFPKMVSFMK SGPILATVWE GKDVVRQGRT ILGATNPLGS APGTIRGDFG IDLGRNVCHG | 120 |
| SDSVDSAERE INLWFKKEEL VDWESNQAKW IYE | 153 |

SEQ ID NO: 183
Artificial Sequence

| | |
|---|---|
| atccgctcta accgaaaagg aaggagttag acaacctgaa gtctaggtcc ctatttattt | 60 |
| tttttaatag ttatgttagt attaagaacg ttatttatat ttcaaatttt tctttttttt | 120 |
| ctgtacaaac gcgtgtacgc atgtaacatt atactgaaaa ccttgcttga gaaggttttg | 180 |
| ggacgctcga ag | 192 |

SEQ ID NO: 184
Saccharomyces cerevisiae

| | |
|---|---|
| atgtcacttc taatagattc tgtaccaaca gttgcttata aggaccaaaa accgggtact | 60 |
| tcaggtttac gtaagaagac caaggttttc atggatgagc ctcattatac tgagaacttc | 120 |
| attcaagcaa caatgcaatc tatccctaat ggctcagagg gaaccacttt agttgttgga | 180 |
| ggagatggtc gtttctacaa cgatgttatc atgaacaaga ttgccgcagt aggtgctgca | 240 |
| aacggtgtca gaaagttagt cattggtcaa ggcggtttac tttcaacacc agctgcttct | 300 |
| catataatta gaacatacga ggaaaagtgt accggtggtg gtatcatatt aactgcctca | 360 |
| cacaacccag gcggtccaga gaatgattta ggtatcaagt ataatttacc taatggtggg | 420 |
| ccagctccag agagtgtcac taacgctatc tgggaagcgt ctaaaaaatt aactcactat | 480 |
| aaaattataa agaacttccc caagttgaat ttgaacaagc ttggtaaaaa ccaaaaatat | 540 |
| ggcccattgt tagtggacat aattgatcct gccaaagcat acgttcaatt tctgaaggaa | 600 |
| atttttgatt ttgacttaat taaaagcttc ttagcgaaac agcgcaaaga caaagggtgg | 660 |
| aagttgttgt ttgactcctt aaatggtatt acaggaccat atggtaaggc tatatttgtt | 720 |
| gatgaatttg gtttaccggc agaggaagtt cttcaaaatt ggcacccttt acctgatttc | 780 |
| ggcggtttac atcccgatcc gaatctaacc tatgcacgaa ctcttgttga cagggttgac | 840 |
| cgcgaaaaaa ttgcctttgg agcagcctcc gatggtgatg gtgataggaa tatgatttac | 900 |
| ggttatggcc ctgctttcgt ttcgccaggt gattctgttg ccattattgc cgaatatgca | 960 |
| cccgaaattc catacttcgc caaacaaggt atttatggct tggcacgttc atttcctaca | 1020 |
| tcctcagcca ttgatcgtgt tgcagcaaaa aagggattaa gatgttacga agttccaacc | 1080 |
| ggctggaaat tcttctgtgc cttatttgat gctaaaaagc tatcaatctg tggtgaagaa | 1140 |
| tccttcggta caggttccaa tcatatcaga gaaaaggacg gtctatgggc cattattgct | 1200 |
| tggttaaata tcttggctat ctaccatagg cgtaaccctg aaaaggaagc ttcgatcaaa | 1260 |
| actattcagg acgaattttg gaacgagtat ggccgtactt tcttcacaag atacgattac | 1320 |
| gaacatatcg aatgcgagca ggccgaaaaa gttgtagctc ttttgagtga atttgtatca | 1380 |
| aggccaaacg tttgtggctc ccacttccca gctgatgagt ctttaaccgt tatcgattgt | 1440 |
| ggtgattttt cgtatagaga tctagatggc tccatctctg aaaatcaagg ccttttcgta | 1500 |
| aagttttcga atgggactaa atttgttttg aggttatccg gcacaggcag ttctggtgca | 1560 |
| acaataagat tatacgtaga aaagtatact gataaaaagg agaactatgg ccaaacagct | 1620 |
| gacgtcttct tgaaacccgt catcaactcc attgtaaaat tcttaagatt taaagaaatt | 1680 |
| ttaggaacag acgaaccaac agtccgcaca tag | 1713 |

SEQ ID NO: 185
Saccharomyces cerevisiae

| | |
|---|---|
| MSLLIDSVPT VAYKDQKPGT SGLRKKTKVF MDEPHYTENF IQATMQSIPN GSEGTTLVVG | 60 |
| GDGRFYNDVI MNKIAAVGAA NGVRKLVIGQ GGLLSTPAAS HIIRTYEEKC TGGGIILTAS | 120 |
| HNPGGPENDL GIKYNLPNGG PAPESVTNAI WEASKKLTHY KIIKNFPKLN LNKLGKNQKY | 180 |
| GPLLVDIIDP AKAYVQFLKE IFDFDLIKSF LAKQRKDKGW KLLFDSLNGI TGPYGKAIFV | 240 |
| DEFGLPAEEV LQNWHPLPDF GGLHPDPNLT YARTLVDRVD REKIAFGAAS DGDGDRNMIY | 300 |
| GYGPAFVSPG DSVAIIAEYA PEIPYFAKQG IYGLARSFPT SSAIDRVAAK KGLRCYEVPT | 360 |
| GWKFFCALFD AKKLSICGEE SFGTGSNHIR EKDGLWAIIA WLNILAIYHR RNPEKEASIK | 420 |
| TIQDEFWNEY GRTFFTRYDY EHIECEQAEK VVALLSEFVS RPNVCGSHFP ADESLTVIDC | 480 |
| GDFSYRDLDG SISENQGLFV KFSNGTKFVL RLSGTGSSGA TIRLYVEKYT DKKENYGQTA | 540 |
| DVFLKPVINS IVKFLRFKEI LGTDEPTVRT | 570 |

SEQ ID NO: 186
Saccharomyces cerevisiae

| | |
|---|---|
| atgtcatttc aaattgaaac ggttcccacc aaaccatatg aagaccaaaa gcctggtacc | 60 |
| tctggtttgc gtaagaagac aaaggtgttt aaagacgaac ctaactacac agaaaatttc | 120 |
| attcaatcga tcatggaagc tattccagag ggttctaaag gtgccactct tgttgtcggt | 180 |
| ggtgatgggc gttactacaa tgatgtcatt cttcataaga ttgccgctat cggtgctgcc | 240 |
| aacggtatta aaaagttagt tattggccag catggtcttc tgtctacgcc agccgcttct | 300 |
| cacatcatga gaacctacga ggaaaaatgt actggtggta ttatcttaac cgcctcacat | 360 |
| aatccaggtg gtccagaaaa tgacatgggt attaagtata acttatccaa tgggggtcct | 420 |
| gctcctgaat ccgtcacaaa tgctatttgg gagatttcca aaaagcttac cagctataag | 480 |
| attatcaaag acttcccaga actagacttg ggtacgatag gcaagaacaa gaaatacggt | 540 |
| ccattactcg ttgacattat cgatattaca aaagattatg tcaacttctt gaaggaaatc | 600 |
| ttcgatttcg acttaatcaa gaaattcatc gataatcaac gttctactaa gaattggaag | 660 |
| ttactgtttg acagtatgaa cggtgtaact ggaccatacg gtaaggctat tttcgttgat | 720 |
| gaatttggtt taccggcgga tgaggtttta caaaactggc atccttctcc ggattttggt | 780 |
| ggtatgcatc cagatccaaa cttaacttat gccagttcgt tagtgaaaag agtagatcgt | 840 |
| gaaaagattg agtttggtgc tgcatccgat ggtgatggtg atagaaatat gatttacggt | 900 |
| tacggcccat ctttcgtttc tccaggtgac tccgtcgcaa ttattgccga atatgcagct | 960 |
| gaaatcccat atttcgccaa gcaaggtata tatggtctgg cccgttcatt ccctacctca | 1020 |
| ggagccatag accgtgttgc caaggcccat ggtctaaact gttatgaggt cccaactggc | 1080 |
| tggaaatttt tctgtgcttt gttcgacgct aaaaaattat ctatttgtgg tgaagaatcg | 1140 |
| tttggtactg gttccaacca cgtaagggaa aaggacggtg tttgggccat tatggcgtgg | 1200 |
| ttgaacatct tggccattta caacaagcat catccggaga acgaagcttc tattaagacg | 1260 |
| atacagaatg aattctgggc aaagtacggc cgtactttct tcactcgtta tgattttgaa | 1320 |
| aaagttgaaa cagaaaaagc taacaagatt gtcgatcaat tgagagcata tgttaccaaa | 1380 |
| tcgggtgttg ttaattccgc cttcccagcc gatgagtctc ttaaggtcac cgattgtggt | 1440 |
| gatttttcat acacagattt ggacggttct gtttctgacc atcaaggttt atatgtcaag | 1500 |
| ctttccaatg gtgcaagatt cgttctaaga ttgtcaggta caggttcttc aggtgctacc | 1560 |
| attagattgt acattgaaaa atactgcgat gataaatcac aataccaaaa gacagctgaa | 1620 |
| gaatacttga agccaattat taactcggtc atcaagttct tgaactttaa acaagtttta | 1680 |
| ggaactgaag aaccaacggt tcgtacttaa | 1710 |

SEQ ID NO: 187
Saccharomyces cerevisiae

| | |
|---|---|
| MSFQIETVPT KPYEDQKPGT SGLRKKTKVF KDEPNYTENF IQSIMEAIPE GSKGATLVVG | 60 |
| GDGRYYNDVI LHKIAAIGAA NGIKKLVIGQ HGLLSTPAAS HIMRTYEEKC TGGIILTASH | 120 |
| NPGGPENDMG IKYNLSNGGP APESVTNAIW EISKKLTSYK IIKDFPELDL GTIGKNKKYG | 180 |
| PLLVDIIDIT KDYVNFLKEI FDFDLIKKFI DNQRSTKNWK LLFDSMNGVT GPYGKAIFVD | 240 |
| EFGLPADEVL QNWHPSPDFG GMHPDPNLTY ASSLVKRVDR EKIEFGAASD GDGDRNMIYG | 300 |
| YGPSFVSPGD SVAIIAEYAA EIPYFAKQGI YGLARSFPTS GAIDRVAKAH GLNCYEVPTG | 360 |
| WKFFCALFDA KKLSICGEES FGTGSNHVRE KDGVWAIMAW LNILAIYNKH HPENEASIKT | 420 |
| IQNEFWAKYG RTFFTRYDFE KVETEKANKI VDQLRAYVTK SGVVNSAFPA DESLKVTDCG | 480 |
| DFSYTDLDGS VSDHQGLYVK LSNGARFVLR LSGTGSSGAT IRLYIEKYCD DKSQYQKTAE | 540 |
| EYLKPIINSV IKFLNFKQVL GTEEPTVRT | 569 |

SEQ ID NO: 188
Artificial Sequence

| | |
|---|---|
| ggaagtacct tcaaagaatg gggtcttatc ttgttttgca agtaccactg agcaggataa | 60 |
| taatagaaat gataatatac tatagtagag ataacgtcga tgacttccca tactgtaatt | 120 |
| gcttttagtt gtgtattttt agtgtgcaag tttctgtaaa tcgattaatt tttttttctt | 180 |
| tcctcttttt attaacctta atttttattt tagattcctg acttcaactc aagacgcaca | 240 |
| gatattataa catctgcata ataggcattt gcaagaatta ctcgtgagta aggaaagagt | 300 |
| gaggaactat cgcatacctg catttaaaga tgccgatttg ggcgcgaatc ctttattttg | 360 |
| gcttcaccct catactatta tcagggccag aaaaaggaag tgtttccctc cttcttgaat | 420 |
| tgatgttacc ctcataaagc acgtggcctc ttatcgagaa agaaattacc gtcgctcgtg | 480 |
| atttgtttgc aaaaagaaca aaactgaaaa aacccagaca cgctcgactt cctgtcttcc | 540 |
| tattgattgc agcttccaat ttcgtcacac aacaaggtcc tagcgacggc tcacaggttt | 600 |
| tgtaacaagc aatcgaaggt tctggaatgg cgggaaaggg tttagtacca catgctatga | 660 |
| tgcccactgt gatctccaga gcaaagttcg ttcgatcgta ctgttactct ctctctttca | 720 |
| aacagaattg tccgaatcgt gtgacaacaa cagcctgttc tcacacactc ttttcttcta | 780 |
| accaaggggg tggtttagtt tagtagaacc tcgtgaaact tacatttaca tatatataaa | 840 |
| cttgcataaa ttggtcaatg caagaaatac atatttggtc ttttctaatt cgtagttttt | 900 |
| caagttctta gatgctttct ttttctcttt tttacagatc atcaaggaag taattatcta | 960 |
| ctttttacaa caaatataaa acaa | 984 |

SEQ ID NO: 189
Saccharomyces cerevisiae

| | |
|---|---|
| atgtccacta agaagcacac caaaacacat tccacttatg cattcgagag caacacaaac | 60 |
| agcgttgctg cctcacaaat gagaaacgcc ttaaacaagt tggcggactc tagtaaactt | 120 |
| gacgatgctg ctcgcgctaa gtttgagaac gaactggatt cgtttttcac gcttttcagg | 180 |
| agatatttgg tagagaagtc ttctagaacc accttggaat gggacaagat caagtctccc | 240 |
| aacccggatg aagtggttaa gtatgaaatt atttctcagc agcccgagaa tgtctcaaac | 300 |
| ctttccaaat tggctgtttt gaagttgaac ggtgggctgg gtacctccat gggctgcgtt | 360 |
| ggccctaaat ctgttattga agtgagagag ggaaacacct ttttggattt gtctgttcgt | 420 |
| caaattgaat acttgaacag acagtacgat agcgacgtgc cattgttatt gatgaattct | 480 |
| ttcaacactg acaaggatac ggaacacttg attaagaagt attccgctaa cagaatcaga | 540 |
| atcagatctt tcaatcaatc caggttccca agagtctaca aggattcttt attgcctgtc | 600 |
| cccaccgaat acgattctcc actggatgct tggtatccac caggtcacgg tgatttgttt | 660 |
| gaatctttac acgtatctgg tgaactggat gccttaattg cccaaggaag agaaatatta | 720 |
| tttgtttcta acggtgacaa cttgggtgct accgtcgact taaaaatttt aaaccacatg | 780 |
| atcgagactg gtgccgaata tataatggaa ttgactgata agaccagagc cgatgttaaa | 840 |
| ggtggtactt tgatttctta cgatggtcaa gtccgtttat tggaagtcgc ccaagttcca | 900 |
| aaagaacaca ttgacgaatt caaaaatatc agaaagttta ccaacttcaa cacgaataac | 960 |
| ttatggatca atctgaaagc agtaaagagg ttgatcgaat cgagcaattt ggagatggaa | 1020 |
| atcattccaa accaaaaaac tataacaaga gacggtcatg aaattaatgt cttacaatta | 1080 |
| gaaaccgctt gtggtgctgc tatcaggcat tttgatggtg ctcacggtgt tgtcgttcca | 1140 |
| agatcaagat tcttgcctgt caagacctgt tccgatttgt tgctggttaa atcagatcta | 1200 |
| ttccgtctgg aacacggttc tttgaagtta gacccatccc gttttggtcc aaacccatta | 1260 |
| atcaagttgg gctcgcattt caaaaaggtt tctggtttta acgcaagaat ccctcacatc | 1320 |
| ccaaaaatcg tcgagctaga tcatttgacc atcactggta acgtcttttt aggtaaagat | 1380 |
| gtcactttga ggggtactgt catcatcgtt tgctccgacg gtcataaaat cgatattcca | 1440 |
| aacggctcca tattggaaaa tgttgtcgtt actggtaatt tgcaaatctt ggaacattga | 1500 |

SEQ ID NO: 190
Saccharomyces cerevisiae

| | |
|---|---|
| MSTKKHTKTH STYAFESNTN SVAASQMRNA LNKLADSSKL DDAARAKFEN ELDSFFTLFR | 60 |
| RYLVEKSSRT TLEWDKIKSP NPDEVVKYEI ISQQPENVSN LSKLAVLKLN GGLGTSMGCV | 120 |
| GPKSVIEVRE GNTFLDLSVR QIEYLNRQYD SDVPLLLMNS FNTDKDTEHL IKKYSANRIR | 180 |
| IRSFNQSRFP RVYKDSLLPV PTEYDSPLDA WYPPGHGDLF ESLHVSGELD ALIAQGREIL | 240 |
| FVSNGDNLGA TVDLKILNHM IETGAEYIME LTDKTRADVK GGTLISYDGQ VRLLEVAQVP | 300 |
| KEHIDEFKNI RKFTNFNTNN LWINLKAVKR LIESSNLEME IIPNQKTITR DGHEINVLQL | 360 |
| ETACGAAIRH FDGAHGVVVP RSRFLPVKTC SDLLLVKSDL FRLEHGSLKL DPSRFGPNPL | 420 |
| IKLGSHFKKV SGFNARIPHI PKIVELDHLT ITGNVFLGKD VTLRGTVIIV CSDGHKIDIP | 480 |
| NGSILENVVV TGNLQILEH | 499 |

The application's sequence listing, which the Patent Office published only in electronic form, follows.

SEQUENCE LISTING (190 sequences)

SEQ ID NO: 1 - DNA, 1383 bp, Artificial Sequence
  Codon-optimized UGT74G1
atggctgaacaacaaaagatcaagaagtctccacacgttttgttgattccatttccattgcaaggtcacatcaacccattcattcaattcggtaagagattgatttccaagggtgttaagactactttggttactaccatccataccttgaactctaccttgaaccattctaacactaccaccacctccattgaaattcaagctatttccgatggttgtgatgaaggtggttttatgtctgctggtgaatcttacttggaaacctttaagcaagttggttctaagtccttggccgatttgattaagaagttgcaatctgaaggtactaccattgatgccattatctacgattctatgaccgaatgggttttggatgttgctattgaattcggtattgatggtggttcattcttcactcaagcttgtgttgttaactccttgtactaccatgttcacaagggtttgatctcattgccattgggtgaaactgtttctgttccaggtttcccagttttacaaagatgggaaactccattgatcttgcaaaaccacgaacaaattcaatctccatggtcccaaatgttgtttggtcaattcgccaacattgatcaagctagatgggtttttaccaactccttctacaagttggaagaagaagttatcgaatggaccagaaagatctggaacttgaaagttattggtccaaccttgccatctatgtacttggataagagattggatgacgataaggacaacggtttcaacttgtacaaggctaaccatcatgaatgcatgaattggttggacgacaagccaaaagaatccgttgtttatgttgctttcggttctttggtcaaacatggtccagaacaagttgaagaaattaccagagccttgatcgattccgatgttaatttcttgtgggtcatcaagcacaaagaagaaggtaaattgccagaaaacttgtccgaagttatcaaaactggtaagggtttgattgtcgcttggtgtaaacaattggatgttttggctcatgaatccgttggttgtttcgttactcattgtggtttcaactccaccttggaagctatttctttgggtgttccagttgttgctatgccacaattttctgatcaaactaccaacgctaagttgttggacgaaattttgggtgttggtgttagagttaaggctgacgaaaatggtatcgttagaagaggtaacttggcttcttgcatcaagatgatcatggaagaagaaagaggtgtcatcattagaaagaacgctgttaagtggaaggatttggctaaagttgctgttcatgaaggtggtagttccgataatgatatcgttgaattcgtttccgaattgatcaaggcctaa

SEQ ID NO: 2 - DNA, 1383 bp, Artificial Sequence
  UGT74G1 Var_1
atggctgaacaacaaaagatcaagaagtctccacacgttttgttgattccatttccattgcaaggtcacatcaacccattcattcaattcggtaagagattgatttccaagggtgttaagactactttggttactaccatccataccttgaactctaccttgaaccattctaacactaccaccacctccattgaaattcaagctatttccgatggttgtgatgaaggtggttttatgtctgctggtgaatcttacttggaaacctttaagcaagttggttctaagtccttggccgatttgattaagaagttgcaatctgaaggtactaccattgatgccattatctacgattctatgaccgaatgggttttggatgttgctattgaattcggtattgatggtggttcattcttcactcaagcttgtgttgttaactccttgtactaccatgttcacaagggtttgatctcattgccattgggtgaaactgtttctgttccaggtttcccagttttacaaagatgggaaactccattgatcttgcaaaaccacgaacaaattcaatctccatggtcccaaatgttgtttggtcaattcgccaacattgatcaagctagatgggtttttaccaactccttctacaagttggaagaagaagttatcgaatggaccagaaagatctggaacttgaaagttattggtccaaccttgccatctatgtacttggataagagattggatgacgataaggacaacggtttcaacttgtacaaggctaaccatcatgaatgcatgaattggttggacgacaagccaaaagaatccgttgtttatgttgctttcggttctttggtcgaacatggtccagaacaagttgaagaaattaccagagccttgatcgattccgatgttaatttcttgtgggtcatcaagcacaaagaagaaggtaaattgccagaaaacttgtccgaagttatcaaaactggtaagggtttgattgtcgcttggtgtaaacaattggatgttttggctcatgaatccgttggttgtttcgttactcattgtggtttcaactccaccttggaagctatttctttgggtgttccagttgttgctatgccacaattttctgatcaaactaccaacgctaagttgttggacgaaattttgggtgttggtgttagagttaaggctgacgaaaatggtatcgttagaagaggtaacttggcttcttgcatcaagatgatcatggaagaagaaagaggtgtcatcattagaaagaacgctgttaagtggaaggatttggctaaagttgctgttcatgaaggtggtagttccgataatgatatcgttgaattcgtttccgaattgatcaaggcctaa

SEQ ID NO: 3 - DNA, 1383 bp, Stevia rebaudiana
atggcagagcaacaaaagatcaaaaagtcacctcacgtcttacttattccatttcctctgcaaggacatatcaacccattcatacaatttgggaaaagattgattagtaagggtgtaaagacaacactggtaaccactatccacactttgaattctactctgaaccactcaaatactactactacaagtatagaaattcaagctatatcagacggatgcgatgagggtggctttatgtctgccggtgaatcttacttggaaacattcaagcaagtgggatccaagtctctggccgatctaatcaaaaagttacagagtgaaggcaccacaattgacgccataatctacgattctatgacagagtgggttttagacgttgctatcgaatttggtattgatggaggttcctttttcacacaagcatgtgttgtgaattctctatactaccatgtgcataaagggttaatctctttaccattgggtgaaactgtttcagttccaggttttccagtgttacaacgttgggaaaccccattgatcttacaaaatcatgaacaaatacaatcaccttggtcccagatgttgtttggtcaattcgctaacatcgatcaagcaagatgggtctttactaattcattctataagttagaggaagaggtaattgaatggactaggaagatctggaatttgaaagtcattggtccaacattgccatcaatgtatttggacaaaagacttgatgatgataaagataatggtttcaatttgtacaaggctaatcatcacgaatgtatgaattggctggatgacaaaccaaaggaatcagttgtatatgttgctttcggctctcttgttaaacatggtccagaacaagttgaggagattacaagagcacttatagactctgacgtaaactttttgtgggtcattaagcacaaagaggaggggaaactgccagaaaacctttctgaagtgataaagaccggaaaaggtctaatcgttgcttggtgtaaacaattggatgttttagctcatgaatctgtaggctgttttgtaacacattgcggattcaactctacactagaagccatttccttaggcgtacctgtcgttgcaatgcctcagttctccgatcagacaaccaacgctaaacttttggacgaaatactaggggtgggtgtcagagttaaagcagacgagaatggtatcgtcagaagagggaacctagcttcatgtatcaaaatgatcatggaagaggaaagaggagttatcataaggaaaaacgcagttaagtggaaggatcttgcaaaggttgccgtccatgaaggcggctcttcagataatgatattgttgaatttgtgtccgaactaatcaaagcctaa

SEQ ID NO: 4 - protein, 460 aa, Stevia rebaudiana
MAEQQKIKKSPHVLLIPFPLQGHINPFIQFGKRLISKGVKTTLVTTIHTLNSTLNHSNTTTTSIEIQAISDGCDEGGFMSAGESYLETFKQVGSKSLADLIKKLQSEGTTIDAIIYDSMTEWVLDVAIEFGIDGGSFFTQACVVNSLYYHVHKGLISLPLGETVSVPGFPVLQRWETPLILQNHEQIQSPWSQMLFGQFANIDQARWVFTNSFYKLEEEVIEWTRKIWNLKVIGPTLPSMYLDKRLDDDKDNGFNLYKANHHECMNWLDDKPKESVVYVAFGSLVKHGPEQVEEITRALIDSDVNFLWVIKHKEEGKLPENLSEVIKTGKGLIVAWCKQLDVLAHESVGCFVTHCGFNSTLEAISLGVPVVAMPQFSDQTTNAKLLDEILGVGVRVKADENGIVRRGNLASCIKMIMEEERGVIIRKNAVKWKDLAKVAVHEGGSSDNDIVEFVSELIKA

SEQ ID NO: 5 - DNA, 1586 bp, Stevia rebaudiana
atggatgcaatggctacaactgagaagaaaccacacgtcatcttcataccatttccagcacaaagccacattaaagccatgctcaaactagcacaacttctccaccacaaaggactccagataaccttcgtcaacaccgacttcatccacaaccagtttcttgaatcatcgggcccacattgtctagacggtgcaccgggtttccggttcgaaaccattccggatggtgtttctcacagtccggaagcgagcatcccaatcagagaatcactcttgagatccattgaaaccaacttcttggatcgtttcattgatcttgtaaccaaacttccggatcctccgacttgtattatctcagatgggttcttgtcggttttcacaattgacgctgcaaaaaagcttggaattccggtcatgatgtattggacacttgctgcctgtgggttcatgggtttttaccatattcattctctcattgagaaaggatttgcaccacttaaagatgcaagttacttgacaaatgggtatttggacaccgtcattgattgggttccgggaatggaaggcatccgtctcaaggatttcccgctggactggagcactgacctcaatgacaaagttttgatgttcactacggaagctcctcaaaggtcacacaaggtttcacatcatattttccacacgttcgatgagttggagcctagtattataaaaactttgtcattgaggtataatcacatttacaccatcggcccactgcaattacttcttgatcaaatacccgaagagaaaaagcaaactggaattacgagtctccatggatacagtttagtaaaagaagaaccagagtgtttccagtggcttcagtctaaagaaccaaattccgtcgtttatgtaaattttggaagtactacagtaatgtctttagaagacatgacggaatttggttggggacttgctaatagcaaccattatttcctttggatcatccgatcaaacttggtgataggggaaaatgcagttttgccccctgaacttgaggaacatataaagaaaagaggctttattgctagctggtgttcacaagaaaaggtcttgaagcacccttcggttggagggttcttgactcattgtgggtggggatcgaccatcgagagcttgtctgctggggtgccaatgatatgctggccttattcgtgggaccagctgaccaactgtaggtatatatgcaaagaatgggaggttgggctcgagatgggaaccaaagtgaaacgagatgaagtcaagaggcttgtacaagagttgatgggagaaggaggtcacaaaatgaggaacaaggctaaagattggaaagaaaaggctcgcattgcaatagctcctaacggttcatcttctttgaacatagacaaaatggtcaaggaaatcaccgtgctagcaagaaactagttacaaagttgtttcacattgtgctttctatttaagatgtaactttgttctaatttaatattgtctagatgtattgaaccataagtttagttggtctcaggaattgatttttaatgaaataatggtcattaggggtgagt

SEQ ID NO: 6 - DNA, 1446 bp, Artificial Sequence
  Codon-optimized UGT85C2
atggatgcaatggcaactactgagaaaaagcctcatgtgatcttcattccatttcctgcacaatctcacataaaggcaatgctaaagttagcacaactattacaccataagggattacagataactttcgtgaataccgacttcatccataatcaatttctggaatctagtggccctcattgtttggacggagccccagggtttagattcgaaacaattcctgacggtgtttcacattccccagaggcctccatcccaataagagagagtttactgaggtcaatagaaaccaactttttggatcgtttcattgacttggtcacaaaacttccagacccaccaacttgcataatctctgatggctttctgtcagtgtttactatcgacgctgccaaaaagttgggtatcccagttatgatgtactggactcttgctgcatgcggtttcatgggtttctatcacatccattctcttatcgaaaagggttttgctccactgaaagatgcatcatacttaaccaacggctacctggatactgttattgactgggtaccaggtatggaaggtataagacttaaagattttcctttggattggtctacagaccttaatgataaagtattgatgtttactacagaagctccacaaagatctcataaggtttcacatcatatctttcacacctttgatgaattggaaccatcaatcatcaaaaccttgtctctaagatacaatcatatctacactattggtccattacaattacttctagatcaaattcctgaagagaaaaagcaaactggtattacatccttacacggctactctttagtgaaagaggaaccagaatgttttcaatggctacaaagtaaagagcctaattctgtggtctacgtcaacttcggaagtacaacagtcatgtccttggaagatatgactgaatttggttggggccttgctaattcaaatcattactttctatggattatcaggtccaatttggtaataggggaaaacgccgtattacctccagaattggaggaacacatcaaaaagagaggtttcattgcttcctggtgttctcaggaaaaggtattgaaacatccttctgttggtggtttccttactcattgcggttggggctctacaatcgaatcactaagtgcaggagttccaatgatttgttggccatattcatgggaccaacttacaaattgtaggtatatctgtaaagagtgggaagttggattagaaatgggaacaaaggttaaacgtgatgaagtgaaaagattggttcaggagttgatgggggaaggtggccacaagatgagaaacaaggccaaagattggaaggaaaaagccagaattgctattgctcctaacgggtcatcctctctaaacattgataagatggtcaaagagattacagtcttagccagaaactaa

SEQ ID NO: 7 - protein, 481 aa, Stevia rebaudiana
MDAMATTEKKPHVIFIPFPAQSHIKAMLKLAQLLHHKGLQITFVNTDFIHNQFLESSGPHCLDGAPGFRFETIPDGVSHSPEASIPIRESLLRSIETNFLDRFIDLVTKLPDPPTCIISDGFLSVFTIDAAKKLGIPVMMYWTLAACGFMGFYHIHSLIEKGFAPLKDASYLTNGYLDTVIDWVPGMEGIRLKDFPLDWSTDLNDKVLMFTTEAPQRSHKVSHHIFHTFDELEPSIIKTLSLRYNHIYTIGPLQLLLDQIPEEKKQTGITSLHGYSLVKEEPECFQWLQSKEPNSVVYVNFGSTTVMSLEDMTEFGWGLANSNHYFLWIIRSNLVIGENAVLPPELEEHIKKRGFIASWCSQEKVLKHPSVGGFLTHCGWGSTIESLSAGVPMICWPYSWDQLTNCRYICKEWEVGLEMGTKVKRDEVKRLVQELMGEGGHKMRNKAKDWKEKARIAIAPNGSSSLNIDKMVKEITVLARN

SEQ ID NO: 8 - DNA, 1377 bp, Artificial Sequence
  Codon-optimized UGT76G1
atggaaaacaagaccgaaacaacagttagacgtaggcgtagaatcattctgtttccagtaccttttcaagggcacatcaatccaatactacaactagccaacgttttgtactctaaaggtttttctattacaatctttcacaccaatttcaacaaaccaaaaacatccaattacccacatttcacattcagattcatacttgataatgatccacaagatgaacgtatttcaaacttacctacccacggtcctttagctggaatgagaattccaatcatcaatgaacatggtgccgatgagcttagaagagaattagagttacttatgttggcatccgaagaggacgaggaagtctcttgtctgattactgacgctctatggtactttgcccaatctgtggctgatagtttgaatttgaggagattggtactaatgacatccagtctgtttaactttcacgctcatgttagtttaccacaatttgacgaattgggatacttggaccctgatgacaagactaggttagaggaacaggcctctggttttcctatgttgaaagtcaaagatatcaagtctgcctattctaattggcaaatcttgaaagagatcttaggaaagatgatcaaacagacaaaggcttcatctggagtgatttggaacagtttcaaagagttagaagagtctgaattggagactgtaatcagagaaattccagcaccttcattcctgataccattaccaaaacatttgactgcttcctcttcctctttgttggatcatgacagaacagtttttcaatggttggaccaacaaccacctagttctgttttgtacgtgtcatttggtagtacttctgaagtcgatgaaaaggacttccttgaaatcgcaagaggcttagtcgatagtaagcagtcattcctttgggtcgtgcgtccaggtttcgtgaaaggctcaacatgggtcgaaccacttccagatggttttctaggcgaaagaggtagaatagtcaaatgggttcctcaacaggaagttttagctcatggcgctattggggcattctggactcattccggatggaattcaactttagaatcagtatgcgaaggggtacctatgatcttttcagattttggtcttgatcaaccactgaacgcaagatacatgtctgatgttttgaaagtgggtgtatatctagaaaatggctgggaaaggggtgaaatagctaatgcaataagacgtgttatggttgatgaagagggggagtatatcagacaaaacgcaagagtgctgaagcaaaaggccgacgtttctctaatgaagggaggctcttcatacgaatccttagaatctcttgtttcctacatttcatcactgtaa

SEQ ID NO: 9 - protein, 458 aa, Stevia rebaudiana
MENKTETTVRRRRRIILFPVPFQGHINPILQLANVLYSKGFSITIFHTNFNKPKTSNYPHFTFRFILDNDPQDERISNLPTHGPLAGMRIPIINEHGADELRRELELLMLASEEDEEVSCLITDALWYFAQSVADSLNLRRLVLMTSSLFNFHAHVSLPQFDELGYLDPDDKTRLEEQASGFPMLKVKDIKSAYSNWQILKEILGKMIKQTKASSGVIWNSFKELEESELETVIREIPAPSFLIPLPKHLTASSSSLLDHDRTVFQWLDQQPPSSVLYVSFGSTSEVDEKDFLEIARGLVDSKQSFLWVVRPGFVKGSTWVEPLPDGFLGERGRIVKWVPQQEVLAHGAIGAFWTHSGWNSTLESVCEGVPMIFSDFGLDQPLNARYMSDVLKVGVYLENGWERGEIANAIRRVMVDEEGEYIRQNARVLKQKADVSLMKGGSSYESLESLVSYISSL

SEQ ID NO: 10 - DNA, 1422 bp, Artificial Sequence
  Codon-optimized UGT91D2e
atggctacatctgattctattgttgatgacaggaagcagttgcatgtggctactttcccttggcttgctttcggtcatatactgccttacctacaactatcaaaactgatagctgaaaaaggacataaagtgtcattcctttcaacaactagaaacattcaaagattatcttcccacatatcaccattgattaacgtcgttcaattgacacttccaagagtacaggaattaccagaagatgctgaagctacaacagatgtgcatcctgaagatatcccttacttgaaaaaggcatccgatggattacagcctgaggtcactagattccttgagcaacacagtccagattggatcatatacgactacactcactattggttgccttcaattgcagcatcactaggcatttctagggcacatttcagtgtaaccacaccttgggccattgcttacatgggtccatccgctgatgctatgattaacggcagtgatggtagaactaccgttgaagatttgacaaccccaccaaagtggtttccatttccaactaaagtctgttggagaaaacacgacttagcaagactggttccatacaaggcaccaggaatctcagacggctatagaatgggtttagtccttaaagggtctgactgcctattgtctaagtgttaccatgagtttgggacacaatggctaccacttttggaaacattacaccaagttcctgtcgtaccagttggtctattacctccagaaatccctggtgatgagaaggacgagacttgggtttcaatcaaaaagtggttagacgggaagcaaaaaggctcagtggtatatgtggcactgggttccgaagttttagtatctcaaacagaagttgtggaacttgccttaggtttggaactatctggattgccatttgtctgggcctacagaaaaccaaaaggccctgcaaagtccgattcagttgaattgccagacggctttgtcgagagaactagagatagagggttggtatggacttcatgggctccacaattgagaatcctgagtcacgaatctgtgtgcggtttcctaacacattgtggttctggttctatagttgaaggactgatgtttggtcatccacttatcatgttgccaatctttggtgaccagcctttgaatgcacgtctgttagaagataaacaagttggaattgaaatcccacgtaatgaggaagatggatgtttaaccaaggagtctgtggccagatcattacgttccgttgtcgttgaaaaggaaggcgaaatctacaaggccaatgcccgtgaactttcaaagatctacaatgacacaaaagtagagaaggaatatgtttctcaatttgtagattacctagagaaaaacgctagagccgtagctattgatcatgaatcctaa

SEQ ID NO: 11 - protein, 473 aa, Stevia rebaudiana
MATSDSIVDDRKQLHVATFPWLAFGHILPYLQLSKLIAEKGHKVSFLSTTRNIQRLSSHISPLINVVQLTLPRVQELPEDAEATTDVHPEDIPYLKKASDGLQPEVTRFLEQHSPDWIIYDYTHYWLPSIAASLGISRAHFSVTTPWAIAYMGPSADAMINGSDGRTTVEDLTTPPKWFPFPTKVCWRKHDLARLVPYKAPGISDGYRMGLVLKGSDCLLSKCYHEFGTQWLPLLETLHQVPVVPVGLLPPEIPGDEKDETWVSIKKWLDGKQKGSVVYVALGSEVLVSQTEVVELALGLELSGLPFVWAYRKPKGPAKSDSVELPDGFVERTRDRGLVWTSWAPQLRILSHESVCGFLTHCGSGSIVEGLMFGHPLIMLPIFGDQPLNARLLEDKQVGIEIPRNEEDGCLTKESVARSLRSVVVEKEGEIYKANARELSKIYNDTKVEKEYVSQFVDYLEKNARAVAIDHES

SEQ ID NO: 12 - DNA, 1422 bp, Artificial Sequence
  Codon-optimized UGT91D2e-b
atggctacttctgattccatcgttgacgatagaaagcaattgcatgttgctacttttccatggttggctttcggtcatattttgccatacttgcaattgtccaagttgattgctgaaaagggtcacaaggtttcattcttgtctaccaccagaaacatccaaagattgtcctctcatatctccccattgatcaacgttgttcaattgactttgccaagagtccaagaattgccagaagatgctgaagctactactgatgttcatccagaagatatcccttacttgaaaaaggcttccgatggtttacaaccagaagttactagattcttggaacaacattccccagattggatcatctacgattatactcattactggttgccatccattgctgcttcattgggtatttctagagcccatttctctgttactactccatgggctattgcttatatgggtccatctgctgatgctatgattaacggttctgatggtagaactaccgttgaagatttgactactccaccaaagtggtttccatttccaacaaaagtctgttggagaaaacacgatttggctagattggttccatacaaagctccaggtatttctgatggttacagaatgggtatggttttgaaaggttccgattgcttgttgtctaagtgctatcatgaattcggtactcaatggttgcctttgttggaaacattgcatcaagttccagttgttccagtaggtttgttgccaccagaaattccaggtgacgaaaaagacgaaacttgggtttccatcaaaaagtggttggatggtaagcaaaagggttctgttgtttatgttgctttgggttccgaagctttggtttctcaaaccgaagttgttgaattggctttgggtttggaattgtctggtttgccatttgtttgggcttacagaaaacctaaaggtccagctaagtctgattctgttgaattgccagatggtttcgttgaaagaactagagatagaggtttggtttggacttcttgggctccacaattgagaattttgtctcatgaatccgtctgtggtttcttgactcattgtggttctggttctatcgttgaaggtttgatgtttggtcacccattgattatgttgccaatctttggtgaccaaccattgaacgctagattattggaagataagcaagtcggtatcgaaatcccaagaaatgaagaagatggttgcttgaccaaagaatctgttgctagatctttgagatccgttgtcgttgaaaaagaaggtgaaatctacaaggctaacgctagagaattgtccaagatctacaacgataccaaggtcgaaaaagaatacgtttcccaattcgttgactacttggaaaagaatgctagagctgttgccattgatcatgaatcttga

SEQ ID NO: 13 - protein, 473 aa, Artificial Sequence
  UGT91D2e-b
MATSDSIVDDRKQLHVATFPWLAFGHILPYLQLSKLIAEKGHKVSFLSTTRNIQRLSSHISPLINVVQLTLPRVQELPEDAEATTDVHPEDIPYLKKASDGLQPEVTRFLEQHSPDWIIYDYTHYWLPSIAASLGISRAHFSVTTPWAIAYMGPSADAMINGSDGRTTVEDLTTPPKWFPFPTKVCWRKHDLARLVPYKAPGISDGYRMGMVLKGSDCLLSKCYHEFGTQWLPLLETLHQVPVVPVGLLPPEIPGDEKDETWVSIKKWLDGKQKGSVVYVALGSEALVSQTEVVELALGLELSGLPFVWAYRKPKGPAKSDSVELPDGFVERTRDRGLVWTSWAPQLRILSHESVCGFLTHCGSGSIVEGLMFGHPLIMLPIFGDQPLNARLLEDKQVGIEIPRNEEDGCLTKESVARSLRSVVVEKEGEIYKANARELSKIYNDTKVEKEYVSQFVDYLEKNARAVAIDHES

SEQ ID NO: 14 - DNA, 1389 bp, Oryza sativa
atggactccggctactcctcctcctacgccgccgccgccgggatgcacgtcgtgatctgcccgtggctcgccttcggccacctgctcccgtgcctcgacctcgcccagcgcctcgcgtcgcggggccaccgcgtgtcgttcgtctccacgccgcggaacatatcccgcctcccgccggtgcgccccgcgctcgcgccgctcgtcgccttcgtggcgctgccgctcccgcgcgtcgaggggctccccgacggcgccgagtccaccaacgacgtcccccacgacaggccggacatggtcgagctccaccggagggccttcgacgggctcgccgcgcccttctcggagttcttgggcaccgcgtgcgccgactgggtcatcgtcgacgtcttccaccactgggccgcagccgccgctctcgagcacaaggtgccatgtgcaatgatgttgttgggctctgcacatatgatcgcttccatagcagacagacggctcgagcgcgcggagacagagtcgcctgcggctgccgggcagggacgcccagcggcggcgccaacgttcgaggtggcgaggatgaagttgatacgaaccaaaggctcatcgggaatgtccctcgccgagcgcttctccttgacgctctcgaggagcagcctcgtcgtcgggcggagctgcgtggagttcgagccggagaccgtcccgctcctgtcgacgctccgcggtaagcctattaccttccttggccttatgccgccgttgcatgaaggccgccgcgaggacggcgaggatgccaccgtccgctggctcgacgcgcagccggccaagtccgtcgtgtacgtcgcgctaggcagcgaggtgccactgggagtggagaaggtccacgagctcgcgctcgggctggagctcgccgggacgcgcttcctctgggctcttaggaagcccactggcgtctccgacgccgacctcctccccgccggcttcgaggagcgcacgcgcggccgcggcgtcgtggcgacgagatgggttcctcagatgagcatactggcgcacgccgccgtgggcgcgttcctgacccactgcggctggaactcgaccatcgaggggctcatgttcggccacccgcttatcatgctgccgatcttcggcgaccagggaccgaacgcgcggctaatcgaggcgaagaacgccggattgcaggtggcaagaaacgacggcgatggatcgttcgaccgagaaggcgtcgcggcggcgattcgtgcagtcgcggtggaggaagaaagcagcaaagtgtttcaagccaaagccaagaagctgcaggagatcgtcgcggacatggcctgccatgagaggtacatcgacggattcattcagcaattgagatcttacaaggattga

SEQ ID NO: 15 - DNA, 1389 bp, Artificial Sequence
  Codon-optimized EUGT11
atggatagtggctactcctcatcttatgctgctgccgctggtatgcacgttgtgatctgcccttggttggcctttggtcacctgttaccatgtctggatttagcccaaagactggcctcaagaggccatagagtatcatttgtgtctactcctagaaatatctctcgtttaccaccagtcagacctgctctagctcctctagttgcattcgttgctcttccacttccaagagtagaaggattgccagacggcgctgaatctactaatgacgtaccacatgatagacctgacatggtcgaattgcatagaagagcctttgatggattggcagctccattttctgagttcctgggcacagcatgtgcagactgggttatagtcgatgtatttcatcactgggctgctgcagccgcattggaacataaggtgccttgtgctatgatgttgttagggtcagcacacatgatcgcatccatagctgatagaagattggaaagagctgaaacagaatccccagccgcagcaggacaaggtaggccagctgccgccccaacctttgaagtggctagaatgaaattgattcgtactaaaggtagttcagggatgagtcttgctgaaaggttttctctgacattatctagatcatcattagttgtaggtagatcctgcgtcgagttcgaacctgaaacagtacctttactatctactttgagaggcaaacctattactttccttggtctaatgcctccattacatgaaggaaggagagaagatggtgaagatgctactgttaggtggttagatgcccaacctgctaagtctgttgtttacgttgcattgggttctgaggtaccactaggggtggaaaaggtgcatgaattagcattaggacttgagctggccggaacaagattcctttgggctttgagaaaaccaaccggtgtttctgacgccgacttgctaccagctgggttcgaagagagaacaagaggccgtggtgtcgttgctactagatgggtcccacaaatgagtattctagctcatgcagctgtaggggcctttctaacccattgcggttggaactcaacaatagaaggactgatgtttggtcatccacttattatgttaccaatctttggcgatcagggacctaacgcaagattgattgaggcaaagaacgcaggtctgcaggttgcacgtaatgatggtgatggttcctttgatagagaaggcgttgcagctgccatcagagcagtcgccgttgaggaagagtcatctaaagttttccaagctaaggccaaaaaattacaagagattgtggctgacatggcttgtcacgaaagatacatcgatggtttcatccaacaattgagaagttataaagactaa

SEQ ID NO: 16 - protein, 462 aa, Oryza sativa
MDSGYSSSYAAAAGMHVVICPWLAFGHLLPCLDLAQRLASRGHRVSFVSTPRNISRLPPVRPALAPLVAFVALPLPRVEGLPDGAESTNDVPHDRPDMVELHRRAFDGLAAPFSEFLGTACADWVIVDVFHHWAAAAALEHKVPCAMMLLGSAHMIASIADRRLERAETESPAAAGQGRPAAAPTFEVARMKLIRTKGSSGMSLAERFSLTLSRSSLVVGRSCVEFEPETVPLLSTLRGKPITFLGLMPPLHEGRREDGEDATVRWLDAQPAKSVVYVALGSEVPLGVEKVHELALGLELAGTRFLWALRKPTGVSDADLLPAGFEERTRGRGVVATRWVPQMSILAHAAVGAFLTHCGWNSTIEGLMFGHPLIMLPIFGDQGPNARLIEAKNAGLQVARNDGDGSFDREGVAAAIRAVAVEEESSKVFQAKAKKLQEIVADMACHERYIDGFIQQLRSYKD

SEQ ID NO: 17 - protein, 465 aa, Artificial Sequence
  UGT91D2e-b-EUGT11 chimera 3
MDSGYSSSYAAAAGMHVVICPWLAFGHLLPCLDLAQRLASRGHRVSFVSTPRNISRLPPVRPALAPLVAFVALPLPRVEGLPDGAESTNDVPHDRPDMVELHRRAFDGLAAPFSEFLGTACADWVIVDVFHHWAAAAALEHKVPCAMMLLGSAHMIASIADRRLERAETESPAAAGQGRPAAAPTFEVARMKLIRTKGSSGMSLAERFSLTLSRSSLVVGRSCVEFEPETVPLLSTLRGKPITFLGLLPPEIPGDEKDETWVSIKKWLDGKQKGSVVYVALGSEALVSQTEVVELALGLELSGLPFVWAYRKPKGPAKSDSVELPDGFVERTRDRGLVWTSWAPQLRILSHESVCGFLTHCGSGSIVEGLMFGHPLIMLPIFGDQPLNARLLEDKQVGIEIARNDGDGSFDREGVAAAIRAVAVEEESSKVFQAKAKKLQEIVADMACHERYIDGFIQQLRSYKD

SEQ ID NO: 18 - protein, 470 aa, Artificial Sequence
  UGT91D2e-b-EUGT11 chimera 7
MATSDSIVDDRKQLHVATFPWLAFGHILPYLQLSKLIAEKGHKVSFLSTTRNIQRLSSHISPLINVVQLTLPRVQELPEDAEATTDVHPEDIPYLKKASDGLQPEVTRFLEQHSPDWIIYDYTHYWLPSIAASLGISRAHFSVTTPWAIAYMGPSADAMINGSDGRTTVEDLTTPPKWFPFPTKVCWRKHDLARLVPYKAPGISDGYRMGMVLKGSDCLLSKCYHEFGTQWLPLLETLHQVPVVPVGLMPPLHEGRREDGEDATVRWLDAQPAKSVVYVALGSEVPLGVEKVHELALGLELAGTRFLWALRKPTGVSDADLLPAGFEERTRGRGVVATRWVPQMSILAHAAVGAFLTHCGWNSTIEGLMFGHPLIMLPIFGDQGPNARLIEAKNAGLQVPRNEEDGCLTKESVARSLRSVVVEKEGEIYKANARELSKIYNDTKVEKEYVSQFVDYLEKNARAVAIDHES

SEQ ID NO: 19 - DNA, 1086 bp, Artificial Sequence
  Codon-optimized GGPPS
atggctttggtaaacccaaccgctcttttctatggtacctctatcagaacaagacctacaaacttactaaatccaactcaaaagctaagaccagtttcatcatcttccttaccttctttctcatcagttagtgcgattcttactgaaaaacatcaatctaatccttctgagaacaacaatttgcaaactcatctagaaactcctttcaactttgatagttatatgttggaaaaagtcaacatggttaacgaggcgcttgatgcatctgtcccactaaaagacccaatcaaaatccatgaatccatgagatactctttattggcaggcggtaagagaatcagaccaatgatgtgtattgcagcctgcgaaatagtcggaggtaatatccttaacgccatgccagccgcatgtgccgtggaaatgattcatactatgtctttggtgcatgacgatcttccatgtatggataatgatgacttcagaagaggtaaacctatttcacacaaggtctacggggaggaaatggcagtattgaccggcgatgctttactaagtttatctttcgaacatatagctactgctacaaagggtgtatcaaaggatagaatcgtcagagctataggggagttggcccgttcagttggctccgaaggtttagtggctggacaagttgtagatatcttgtcagagggtgctgatgttggattagatcacctagaatacattcacatccacaaaacagcaatgttgcttgagtcctcagtagttattggcgctatcatgggaggaggatctgatcagcagatcgaaaagttgagaaaattcgctagatctattggtctactattccaagttgtggatgacattttggatgttacaaaatctaccgaagagttggggaaaacagctggtaaggatttgttgacagataagacaacttacccaaagttgttaggtatagaaaagtccagagaatttgccgaaaaacttaacaaggaagcacaagagcaattaagtggctttgatagacgtaaggcagctcctttgatcgcgttagccaactacaatgcgtaccgtcaaaattga

SEQ ID NO: 20 - protein, 361 aa, Stevia rebaudiana
MALVNPTALFYGTSIRTRPTNLLNPTQKLRPVSSSSLPSFSSVSAILTEKHQSNPSENNNLQTHLETPFNFDSYMLEKVNMVNEALDASVPLKDPIKIHESMRYSLLAGGKRIRPMMCIAACEIVGGNILNAMPAACAVEMIHTMSLVHDDLPCMDNDDFRRGKPISHKVYGEEMAVLTGDALLSLSFEHIATATKGVSKDRIVRAIGELARSVGSEGLVAGQVVDILSEGADVGLDHLEYIHIHKTAMLLESSVVIGAIMGGGSDQQIEKLRKFARSIGLLFQVVDDILDVTKSTEELGKTAGKDLLTDKTTYPKLLGIEKSREFAEKLNKEAQEQLSGFDRRKAAPLIALANYNAYRQN

SEQ ID NO: 21 - DNA, 1029 bp, Artificial Sequence
  Codon-optimized GGPPS
atggctgagcaacaaatatctaacttgctgtctatgtttgatgcttcacatgctagtcagaaattagaaattactgtccaaatgatggacacataccattacagagaaacgcctccagattcctcatcttctgaaggcggttcattgtctagatacgacgagagaagagtctctttgcctctcagtcataatgctgcctctccagatattgtatcacaactatgtttttccactgcaatgtcttcagagttgaatcacagatggaaatctcaaagattaaaggtggccgattctccttacaactatatcctaacattaccatcaaaaggaattagaggtgcctttatcgattccctgaacgtatggttggaggttccagaggatgaaacatcagtcatcaaggaagttattggtatgctccacaactcttcattaatcattgatgacttccaagataattctccacttagaagaggaaagccatctacccatacagtcttcggccctgcccaggctatcaatactgctacttacgttatagttaaagcaatcgaaaagatacaagacatagtgggacacgatgcattggcagatgttacgggtactattacaactattttccaaggtcaggccatggacttgtggtggacagcaaatgcaatcgttccatcaatacaggaatacttacttatggtaaacgataaaaccggtgctctctttagactgagtttggagttgttagctctgaattccgaagccagtatttctgactctgctttagaaagtttatctagtgctgtttccttgctaggtcaatacttccaaatcagagacgactatatgaacttgatcgataacaagtatacagatcagaaaggcttctgcgaagatcttgatgaaggcaagtactcactaacacttattcatgccctccaaactgattcatccgatctactgaccaacatcctttcaatgagaagagtgcaaggaaagttaacggcacaaaagagatgttggttctggaaatga

SEQ ID NO: 22 - protein, 342 aa, Gibberella fujikuroi
MAEQQISNLLSMFDASHASQKLEITVQMMDTYHYRETPPDSSSSEGGSLSRYDERRVSLPLSHNAASPDIVSQLCFSTAMSSELNHRWKSQRLKVADSPYNYILTLPSKGIRGAFIDSLNVWLEVPEDETSVIKEVIGMLHNSSLIIDDFQDNSPLRRGKPSTHTVFGPAQAINTATYVIVKAIEKIQDIVGHDALADVTGTITTIFQGQAMDLWWTANAIVPSIQEYLLMVNDKTGALFRLSLELLALNSEASISDSALESLSSAVSLLGQYFQIRDDYMNLIDNKYTDQKGFCEDLDEGKYSLTLIHALQTDSSDLLTNILSMRRVQGKLTAQKRCWFWK

SEQ ID NO: 23 - DNA, 903 bp, Artificial Sequence
  Codon-optimized GGPPS
atggaaaagactaaggagaaagcagaacgtatcttgctggagccatacagatacttattacaactaccaggaaagcaagtccgttctaaactatcacaagcgttcaatcactggttaaaagttcctgaagataagttacaaatcattattgaagtcacagaaatgctacacaatgcttctttactgatcgatgatatagaggattcttccaaactgagaagaggttttcctgtcgctcattccatatacggggtaccaagtgtaatcaactcagctaattacgtctacttcttgggattggaaaaagtattgacattagatcatccagacgctgtaaagctattcaccagacaacttcttgaattgcatcaaggtcaaggtttggatatctattggagagacacttatacttgcccaacagaagaggagtacaaagcaatggttctacaaaagactggcggtttgttcggacttgccgttggtctgatgcaacttttctctgattacaaggaggacttaaagcctctgttggataccttgggcttgtttttccagattagagatgactacgctaacttacattcaaaggaatattcagaaaacaaatcattctgtgaagatttgactgaagggaagtttagttttccaacaatccacgccatttggtcaagaccagaatctactcaagtgcaaaacattctgcgtcagagaacagagaatattgacatcaaaaagtattgtgttcagtacttggaagatgttggttcttttgcttacacaagacatacacttagagaattagaggcaaaagcatacaagcaaatagaagcctgtggaggcaatccttctctagtggcattggttaaacatttgtccaaaatgttcaccgaggaaaacaagtaa

SEQ ID NO: 24 - protein, 300 aa, Mus musculus
MEKTKEKAERILLEPYRYLLQLPGKQVRSKLSQAFNHWLKVPEDKLQIIIEVTEMLHNASLLIDDIEDSSKLRRGFPVAHSIYGVPSVINSANYVYFLGLEKVLTLDHPDAVKLFTRQLLELHQGQGLDIYWRDTYTCPTEEEYKAMVLQKTGGLFGLAVGLMQLFSDYKEDLKPLLDTLGLFFQIRDDYANLHSKEYSENKSFCEDLTEGKFSFPTIHAIWSRPESTQVQNILRQRTENIDIKKYCVQYLEDVGSFAYTRHTLRELEAKAYKQIEACGGNPSLVALVKHLSKMFTEENK

SEQ ID NO: 25 - DNA, 1020 bp, Artificial Sequence
  Codon-optimized GGPPS
atggcaagattctattttcttaacgcactattgatggttatctcattacaatcaactacagccttcactccagctaaacttgcttatccaacaacaacaacagctctaaatgtcgcctccgccgaaacttctttcagtctagatgaatacttggcctctaagataggacctatagagtctgccttggaagcatcagtcaaatccagaattccacagaccgataagatctgcgaatctatggcctactctttgatggcaggaggcaagagaattagaccagtgttgtgtatcgctgcatgtgagatgttcggtggatcccaagatgtcgctatgcctactgctgtggcattagaaatgatacacacaatgtctttgattcatgatgatttgccatccatggataacgatgacttgagaagaggtaaaccaacaaaccatgtcgttttcggcgaagatgtagctattcttgcaggtgactctttattgtcaacttccttcgagcacgtcgctagagaaacaaaaggagtgtcagcagaaaagatcgtggatgttatcgctagattaggcaaatctgttggtgccgagggccttgctggcggtcaagttatggacttagaatgtgaagctaaaccaggtaccacattagacgacttgaaatggattcatatccataaaaccgctacattgttacaagttgctgtagcttctggtgcagttctaggtggtgcaactcctgaagaggttgctgcatgcgagttgtttgctatgaatataggtcttgcctttcaagttgccgacgatatccttgatgtaaccgcttcatcagaagatttgggtaaaactgcaggcaaagatgaagctactgataagacaacttacccaaagttattaggattagaagagagtaaggcatacgcaagacaactaatcgatgaagccaaggaaagtttggctccttttggagatagagctgcccctttattggccattgcagatttcattattgatagaaagaattga

SEQ ID NO: 26 - protein, 339 aa, Thalassiosira pseudonana
MARFYFLNALLMVISLQSTTAFTPAKLAYPTTTTALNVASAETSFSLDEYLASKIGPIESALEASVKSRIPQTDKICESMAYSLMAGGKRIRPVLCIAACEMFGGSQDVAMPTAVALEMIHTMSLIHDDLPSMDNDDLRRGKPTNHVVFGEDVAILAGDSLLSTSFEHVARETKGVSAEKIVDVIARLGKSVGAEGLAGGQVMDLECEAKPGTTLDDLKWIHIHKTATLLQVAVASGAVLGGATPEEVAACELFAMNIGLAFQVADDILDVTASSEDLGKTAGKDEATDKTTYPKLLGLEESKAYARQLIDEAKESLAPFGDRAAPLLAIADFIIDRKN

SEQ ID NO: 27 - DNA, 1068 bp, Artificial Sequence
  Codon-optimized GGPPS
atgcacttagcaccacgtagagtccctagaggtagaagatcaccacctgacagagttcctgaaagacaaggtgccttgggtagaagacgtggagctggctctactggctgtgcccgtgctgctgctggtgttcaccgtagaagaggaggaggcgaggctgatccatcagctgctgtgcatagaggctggcaagccggtggtggcaccggtttgcctgatgaggtggtgtctaccgcagccgccttagaaatgtttcatgcttttgctttaatccatgatgatatcatggatgatagtgcaactagaagaggctccccaactgttcacagagccctagctgatcgtttaggcgctgctctggacccagatcaggccggtcaactaggagtttctactgctatcttggttggagatctggctttgacatggtccgatgaattgttatacgctccattgactccacatagactggcagcagtactaccattggtaacagctatgagagctgaaaccgttcatggccaatatcttgatataactagtgctagaagacctgggaccgatacttctcttgcattgagaatagccagatataagacagcagcttacacaatggaacgtccactgcacattggtgcagccctggctggggcaagaccagaactattagcagggctttcagcatacgccttgccagctggagaagccttccaattggcagatgacctgctaggcgtcttcggtgatccaagacgtacagggaaacctgacctagatgatcttagaggtggaaagcatactgtcttagtcgccttggcaagagaacatgccactccagaacagagacacacattggatacattattgggtacaccaggtcttgatagacaaggcgcttcaagactaagatgcgtattggtagcaactggtgcaagagccgaagccgaaagacttattacagagagaagagatcaagcattaactgcattgaacgcattaacactgccacctcctttagctgaggcattagcaagattgacattagggtctacagctcatcctgcctaa

SEQ ID NO: 28 - protein, 355 aa, Streptomyces clavuligerus
MHLAPRRVPRGRRSPPDRVPERQGALGRRRGAGSTGCARAAAGVHRRRGGGEADPSAAVHRGWQAGGGTGLPDEVVSTAAALEMFHAFALIHDDIMDDSATRRGSPTVHRALADRLGAALDPDQAGQLGVSTAILVGDLALTWSDELLYAPLTPHRLAAVLPLVTAMRAETVHGQYLDITSARRPGTDTSLALRIARYKTAAYTMERPLHIGAALAGARPELLAGLSAYALPAGEAFQLADDLLGVFGDPRRTGKPDLDDLRGGKHTVLVALAREHATPEQRHTLDTLLGTPGLDRQGASRLRCVLVATGARAEAERLITERRDQALTALNALTLPPPLAEALARLTLGSTAHPA

SEQ ID NO: 29 - DNA, 993 bp, Artificial Sequence
  Codon-optimized GGPPS
atgtcatatttcgataactacttcaatgagatagttaattccgtgaacgacatcattaagtcttacatctctggcgacgtaccaaaactatacgaagcctcctaccatttgtttacatcaggaggaaagagactaagaccattgatccttacaatttcttctgatcttttcggtggacagagagaaagagcatactatgctggcgcagcaatcgaagttttgcacacattcactttggttcacgatgatatcatggatcaagataacattcgtagaggtcttcctactgtacatgtcaagtatggcctacctttggccattttagctggtgacttattgcatgcaaaagcctttcaattgttgactcaggcattgagaggtctaccatctgaaactatcatcaaggcgtttgatatctttacaagatctatcattatcatatcagaaggtcaagctgtcgatatggaattcgaagatagaattgatatcaaggaacaagagtatttggatatgatatctcgtaaaaccgctgccttattctcagcttcttcttccattggggcgttgatagctggagctaatgataacgatgtgagattaatgtccgatttcggtacaaatcttgggatcgcatttcaaattgtagatgatatacttggtttaacagctgatgaaaaagagctaggaaaacctgttttcagtgatatcagagaaggtaaaaagaccatattagtcattaagactttagaattgtgtaaggaagacgagaaaaagattgtgttaaaagcgctaggcaacaagtcagcatcaaaggaagagttgatgagttctgctgacataatcaaaaagtactcattggattacgcctacaacttagctgagaaatactacaaaaacgccatcgattctctaaatcaagtttcaagtaaaagtgatattccagggaaggcattgaaatatcttgctgaattcaccatcagaagacgtaagtaa

SEQ ID NO: 30 - protein, 330 aa, Sulfolobus acidocaldarius
MSYFDNYFNEIVNSVNDIIKSYISGDVPKLYEASYHLFTSGGKRLRPLILTISSDLFGGQRERAYYAGAAIEVLHTFTLVHDDIMDQDNIRRGLPTVHVKYGLPLAILAGDLLHAKAFQLLTQALRGLPSETIIKAFDIFTRSIIIISEGQAVDMEFEDRIDIKEQEYLDMISRKTAALFSASSSIGALIAGANDNDVRLMSDFGTNLGIAFQIVDDILGLTADEKELGKPVFSDIREGKKTILVIKTLELCKEDEKKIVLKALGNKSASKEELMSSADIIKKYSLDYAYNLAEKYYKNAIDSLNQVSSKSDIPGKALKYLAEFTIRRRK

SEQ ID NO: 31 - DNA, 894 bp, Artificial Sequence
  Codon-optimized GGPPS
atggtcgcacaaactttcaacctggatacctacttatcccaaagacaacaacaagttgaagaggccctaagtgctgctcttgtgccagcttatcctgagagaatatacgaagctatgagatactccctcctggcaggtggcaaaagattaagacctatcttatgtttagctgcttgcgaattggcaggtggttctgttgaacaagccatgccaactgcgtgtgcacttgaaatgatccatacaatgtcactaattcatgatgacctgccagccatggataacgatgatttcagaagaggaaagccaactaatcacaaggtgttcggggaagatatagccatcttagcgggtgatgcgcttttagcttacgcttttgaacatattgcttctcaaacaagaggagtaccacctcaattggtgctacaagttattgctagaatcggacacgccgttgctgcaacaggcctcgttggaggccaagtcgtagaccttgaatctgaaggtaaagctatttccttagaaacattggagtatattcactcacataagactggagccttgctggaagcatcagttgtctcaggcggtattctcgcaggggcagatgaagagcttttggccagattgtctcattacgctagagatataggcttggcttttcaaatcgtcgatgatatcctggatgttactgctacatctgaacagttggggaaaaccgctggtaaagaccaggcagccgcaaaggcaacttatccaagtctattgggtttagaagcctctagacagaaagcggaagagttgattcaatctgctaaggaagccttaagaccttacggttcacaagcagagccactcctagcgctggcagacttcatcacacgtcgtcagcattaa

SEQ ID NO: 32 - protein, 297 aa, Synechococcus sp.
MVAQTFNLDTYLSQRQQQVEEALSAALVPAYPERIYEAMRYSLLAGGKRLRPILCLAACELAGGSVEQAMPTACALEMIHTMSLIHDDLPAMDNDDFRRGKPTNHKVFGEDIAILAGDALLAYAFEHIASQTRGVPPQLVLQVIARIGHAVAATGLVGGQVVDLESEGKAISLETLEYIHSHKTGALLEASVVSGGILAGADEELLARLSHYARDIGLAFQIVDDILDVTATSEQLGKTAGKDQAAAKATYPSLLGLEASRQKAEELIQSAKEALRPYGSQAEPLLALADFITRRQH

SEQ ID NO: 33 - DNA, 1680 bp, Artificial Sequence
  Codon-optimized CDPS
atgaaaaccgggtttatctcaccagcaacagtatttcatcacagaatctcaccagcgaccactttcagacatcacttatcacctgctactacaaactctacaggcattgtcgccttaagagacatcaacttcagatgtaaagcagtttctaaagagtactctgatctgttgcagaaagatgaggcttctttcacaaaatgggacgatgacaaggtgaaagatcatcttgataccaacaaaaacttatacccaaatgatgagattaaggaatttgttgaatcagtaaaggctatgttcggtagtatgaatgacggggagataaacgtctctgcatacgatactgcatgggttgctttggttcaagatgtcgatggatcaggtagtcctcagttcccttcttctttagaatggattgccaacaatcaattgtcagatggatcatggggagatcatttgctgttctcagctcacgatagaatcatcaacacattagcatgcgttattgcacttacaagttggaatgttcatccttctaagtgtgaaaaaggtttgaattttctgagagaaaacatttgcaaattagaagatgaaaacgcagaacatatgccaattggttttgaagtaacattcccatcactaattgatatcgcgaaaaagttgaacattgaagtacctgaggatactccagcacttaaagagatctacgcacgtagagatatcaagttaactaagatcccaatggaagttcttcacaaggtacctactactttgttacattctttggaaggaatgcctgatttggagtgggaaaaactgttaaagctacaatgtaaagatggtagtttcttgttttccccatctagtaccgcattcgccctaatgcaaacaaaagatgagaaatgcttacagtatctaacaaatatcgtcactaagttcaacggtggcgtgcctaatgtgtacccagtcgatttgtttgaacatatttgggttgttgatagactgcagagattggggattgccagatacttcaaatcagagataaaagattgtgtagagtatatcaataagtactggaccaaaaatggaatttgttgggctagaaatactcacgttcaagatatcgatgatacagccatgggattcagagtgttgagagcgcacggttatgacgtcactccagatgtttttagacaatttgaaaaagatggtaaattcgtttgctttgcagggcaatcaacacaagccgtgacaggaatgtttaacgtttacagagcctctcaaatgttgttcccaggggagagaattttggaagatgccaaaaagttctcttacaattacttaaaggaaaagcaaagtaccaacgaattgctggataaatggataatcgctaaagatctacctggtgaagttggttatgctctggatatcccatggtatgcttccttaccaagattggaaactcgttattaccttgaacaatacggcggtgaagatgatgtctggataggcaagacattatacagaatgggttacgtgtccaataacacatatctagaaatggcaaagctggattacaataactatgttgcagtccttcaattagaatggtacacaatacaacaatggtacgtcgatattggtatagagaagttcgaatctgacaacatcaagtcagtcctg

SEQ ID NO: 34 - protein, 787 aa, Stevia rebaudiana
MKTGFISPATVFHHRISPATTFRHHLSPATTNSTGIVALRDINFRCKAVSKEYSDLLQKDEASFTKWDDDKVKDHLDTNKNLYPNDEIKEFVESVKAMFGSMNDGEINVSAYDTAWVALVQDVDGSGSPQFPSSLEWIANNQLSDGSWGDHLLFSAHDRIINTLACVIALTSWNVHPSKCEKGLNFLRENICKLEDENAEHMPIGFEVTFPSLIDIAKKLNIEVPEDTPALKEIYARRDIKLTKIPMEVLHKVPTTLLHSLEGMPDLEWEKLLKLQCKDGSFLFSPSSTAFALMQTKDEKCLQYLTNIVTKFNGGVPNVYPVDLFEHIWVVDRLQRLGIARYFKSEIKDCVEYINKYWTKNGICWARNTHVQDIDDTAMGFRVLRAHGYDVTPDVFRQFEKDGKFVCFAGQSTQAVTGMFNVYRASQMLFPGERILEDAKKFSYNYLKEKQSTNELLDKWIIAKDLPGEVGYALDIPWYASLPRLETRYYLEQYGGEDDVWIGKTLYRMGYVSNNTYLEMAKLDYNNYVAVLQLEWYTIQQWYVDIGIEKFESDNIKSVLVSYYLAAASIFEPERSKERIAWAKTTILVDKITSIFDSSQSSKEDITAFIDKFRNKSSSKKHSINGEPWHEVMVALKKTLHGFALDALMTHSQDIHPQLHQAWEMWLTKLQDGVDVTAELMVQMINMTAGRWVSKELLTHPQYQRLSTVTNSVCHDITKLHNFKENSTTVDSKVQELVQLVFSDTPDDLDQDMKQTFLTVMKTFYYKAWCDPNTINDHISKVFEIVI

SEQ ID NO: 35 - DNA, 1584 bp, Artificial Sequence
  Codon-optimized CDPS
atgcctgatgcacacgatgctccacctccacaaataagacagagaacactagtagatgaggctacccaactgctaactgagtccgcagaagatgcatggggtgaagtcagtgtgtcagaatacgaaacagcaaggctagttgcccatgctacatggttaggtggacacgccacaagagtggccttccttctggagagacaacacgaagacgggtcatggggtccaccaggtggatataggttagtccctacattatctgctgttcacgcattattgacatgtcttgcctctcctgctcaggatcatggcgttccacatgatagacttttaagagctgttgacgcaggcttgactgccttgagaagattggggacatctgactccccacctgatactatagcagttgagctggttatcccatctttgctagagggcattcaacacttactggaccctgctcatcctcatagtagaccagccttctctcaacatagaggctctcttgtttgtcctggtggactagatgggagaactctaggagctttgagatcacacgccgcagcaggtacaccagtaccaggaaaagtctggcacgcttccgagactttgggcttgagtaccgaagctgcttctcacttgcaaccagcccaaggtataatcggtggctctgctgctgccacagcaacatggctaaccagggttgcaccatctcaacagtcagattctgccagaagataccttgaggaattacaacacagatactctggcccagttccttccattacccctatcacatacttcgaaagagcatggttattgaacaattttgcagcagccggtgttccttgtgaggctccagctgctttgttggattccttagaagcagcacttacaccacaaggtgctcctgctggagcaggattgcctccagatgctgatgatacagccgctgtgttgcttgcattggcaacacatgggagaggtagaagaccagaagtactgatggattacaggactgacgggtatttccaatgctttattggggaaaggactccatcaatttcaacaaacgctcacgtattggaaacattagggcatcatgtggcccaacatccacaagatagagccagatacggatcagccatggataccgcatcagcttggctgctggcagctcaaaagcaagatggctcttggttagataaatggcatgcctcaccatactacgctactgtttgttgcacacaagccctagccgctcatgcaagtcctgcaactgcaccagctagacagagagctgtcagatgggttttagccacacaaagatccgatggcggttggggtctatggcattcaactgttgaagagactgcttatgccttacagatcttggccccaccttctggtggtggcaatatcccagtccaacaagcacttactagaggcagagcaagattgtgtggagccttgccactgactcctttatggcatgataaggatttgtatactccagtaagagtagtcagagctgccagagctgctgctctgtacactaccagagatctattgttaccaccattgtaa

SEQ ID NO: 36 - protein, 527 aa, Streptomyces clavuligerus
MPDAHDAPPPQIRQRTLVDEATQLLTESAEDAWGEVSVSEYETARLVAHATWLGGHATRVAFLLERQHEDGSWGPPGGYRLVPTLSAVHALLTCLASPAQDHGVPHDRLLRAVDAGLTALRRLGTSDSPPDTIAVELVIPSLLEGIQHLLDPAHPHSRPAFSQHRGSLVCPGGLDGRTLGALRSHAAAGTPVPGKVWHASETLGLSTEAASHLQPAQGIIGGSAAATATWLTRVAPSQQSDSARRYLEELQHRYSGPVPSITPITYFERAWLLNNFAAAGVPCEAPAALLDSLEAALTPQGAPAGAGLPPDADDTAAVLLALATHGRGRRPEVLMDYRTDGYFQCFIGERTPSISTNAHVLETLGHHVAQHPQDRARYGSAMDTASAWLLAAQKQDGSWLDKWHASPYYATVCCTQALAAHASPATAPARQRAVRWVLATQRSDGGWGLWHSTVEETAYALQILAPPSGGGNIPVQQALTRGRARLCGALPLTPLWHDKDLYTPVRVVRAARAAALYTTRDLLLPPL

SEQ ID NO: 37 - DNA, 1551 bp, Artificial Sequence
  Codon-optimized CDPS
atgaacgccctatccgaacacattttgtctgaattgagaagattattgtctgaaatgagtgatggcggatctgttggtccatctgtgtatgatacggcccaggccctaagattccacggtaacgtaacaggtagacaagatgcatatgcttggttgatcgcccagcaacaagcagatggaggttggggctctgccgactttccactctttagacatgctccaacatgggctgcacttctcgcattacaaagagctgatccacttcctggcgcagcagacgcagttcagaccgcaacaagattcttgcaaagacaaccagatccatacgctcatgccgttcctgaggatgcccctattggtgctgaactgatcttgcctcagttttgtggagaggctgcttggttgttgggaggtgtggccttccctagacacccagccctattaccattaagacaggcttgtttagtcaaactgggtgcagtcgccatgttgccttcaggacacccattgctccactcctgggaggcatggggtacttctccaacaacagcctgtccagacgatgatggttctataggtatctcaccagcagctacagccgcctggagagcccaggctgtgaccagaggctcaactcctcaagtgggcagagctgacgcatacttacaaatggcttcaagagcaacgagatcaggcatagaaggagtcttccctaatgtttggcctataaacgtattcgaaccatgctggtcactgtacactctccatcttgccggtctgttcgcccatccagcactggctgaggctgtaagagttatcgttgctcaacttgaagcaagattgggagtgcatggcctcggaccagctttacattttgctgccgacgctgatgatactgcagttgccttatgcgttctgcatttggctggcagagatcctgcagttgacgcattgagacattttgaaattggtgagctctttgttacattcccaggagagagaaatgctagtgtctctacgaacattcacgctcttcatgctttgagattgttaggtaaaccagctgccggagcaagtgcatacgtcgaagcaaatagaaatccacatggtttgtgggacaacgaaaaatggcacgtttcatggctttatccaactgcacacgccgttgcagctctagctcaaggcaagcctcaatggagagatgaaagagcactagccgctctactacaagctcaaagagatgatggtggttggggagctggtagaggatccactttcgaggaaaccgcctacgctcttttcgctttacacgttatggacggatctgaggaagccacaggcagaagaagaatcgctcaagtcgtcgcaagagccttagaatggatgctagctagacatgccgcacatggattaccacaaacaccactctggattggtaaggaattgtactgtcctactagagtcgtaagagtagctgagctagctggcctgtggttagcattaagatggggtagaagagtattagctgaaggtgctggtgctgcaccttaa

SEQ ID NO: 38 - protein, 516 aa, Bradyrhizobium japonicum
MNALSEHILSELRRLLSEMSDGGSVGPSVYDTAQALRFHGNVTGRQDAYAWLIAQQQADGGWGSADFPLFRHAPTWAALLALQRADPLPGAADAVQTATRFLQRQPDPYAHAVPEDAPIGAELILPQFCGEAAWLLGGVAFPRHPALLPLRQACLVKLGAVAMLPSGHPLLHSWEAWGTSPTTACPDDDGSIGISPAATAAWRAQAVTRGSTPQVGRADAYLQMASRATRSGIEGVFPNVWPINVFEPCWSLYTLHLAGLFAHPALAEAVRVIVAQLEARLGVHGLGPALHFAADADDTAVALCVLHLAGRDPAVDALRHFEIGELFVTFPGERNASVSTNIHALHALRLLGKPAAGASAYVEANRNPHGLWDNEKWHVSWLYPTAHAVAALAQGKPQWRDERALAALLQAQRDDGGWGAGRGSTFEETAYALFALHVMDGSEEATGRRRIAQVVARALEWMLARHAAHGLPQTPLWIGKELYCPTRVVRVAELAGLWLALRWGRRVLAEGAGAAP

SEQ ID NO: 39 - DNA, 2490 bp, Artificial Sequence
  Codon-optimized CDPS
atggttttgtcttcttcttgtactacagtaccacacttatcttcattagctgtcgtgcaacttggtccttggagcagtaggattaaaaagaaaaccgatactgttgcagtaccagccgctgcaggaaggtggagaagggccttggctagagcacagcacacatcagaatccgcagctgtcgcaaagggcagcagtttgacccctatagtgagaactgacgctgagtcaaggagaacaagatggccaaccgatgacgatgacgccgaacctttagtggatgagatcagggcaatgcttacttccatgtctgatggtgacatttccgtgagcgcatacgatacagcctgggtcggattggttccaagattagacggcggtgaaggtcctcaatttccagcagctgtgagatggataagaaataaccagttgcctgacggaagttggggcgatgccgcattattctctgcctatgacaggcttatcaatacccttgcctgcgttgtaactttgacaaggtggtccctagaaccagagatgagaggtagaggactatcttttttgggtaggaacatgtggaaattagcaactgaagatgaagagtcaatgcctattggcttcgaattagcatttccatctttgatagagcttgctaagagcctaggtgtccatgacttcccttatgatcaccaggccctacaaggaatctactcttcaagagagatcaaaatgaagaggattccaaaagaagtgatgcataccgttccaacatcaatattgcacagtttggagggtatgcctggcctagattgggctaaactacttaaactacagagcagcgacggaagttttttgttctcaccagctgccactgcatatgctttaatgaataccggagatgacaggtgttttagctacatcgatagaacagtaaagaaattcaacggcggcgtccctaatgtttatccagtggatctatttgaacatatttgggccgttgatagacttgaaagattaggaatctccaggtacttccaaaaggagatcgaacaatgcatggattatgtaaacaggcattggactgaggacggtatttgttgggcaaggaactctgatgtcaaagaggtggacgacacagctatggcctttagacttcttaggttgcacggctacagcgtcagtcctgatgtgtttaaaaacttcgaaaaggacggtgaatttttcgcatttgtcggacagtctaatcaagctgttaccggtatgtacaacttaaacagagcaagccagatatccttcccaggcgaggatgtgcttcatagagctggtgccttctcatatgagttcttgaggagaaaagaagcagagggagctttgagggacaagtggatcatttctaaagatctacctggtgaagttgtgtatactttggattttccatggtacggcaacttacctagagtcgaggccagagactacctagagcaatacggaggtggtgatgacgtttggattggcaagacattgtataggatgccacttgtaaacaatgatgtatatttggaattggcaagaatggatttcaaccactgccaggctttgcatcagttagagtggcaaggactaaaaagatggtatactgaaaataggttgatggactttggtgtcgcccaagaagatgcccttagagcttattttcttgcagccgcatctgtttacgagccttgtagagctgccgagaggcttgcatgggctagagccgcaatactagctaacgccgtgagcacccacttaagaaatagcccatcattcagagaaaggttagagcattctcttaggtgtagacctagtgaagagacagatggctcctggtttaactcctcaagtggctctgatgcagttttagtaaaggctgtcttaagacttactgattcattagccagggaagcacagccaatccatggaggtgacccagaagatattatacacaagttgttaagatctgcttgggccgagtgggttagggaaaaggcagacgctgccgatagcgtgtgcaatggtagttctgcagtagaacaagagggatcaagaatggtccatgataaacagacctgtctattattggctagaatgatcgaaatttctgccggtagggcagctggtgaagcagccagtgaggacggcgatagaagaataattcaattaacaggctccatctgcgacagtcttaagcaaaaaatgctagtttcacaggaccctgaaaaaaatgaagagatgatgtctcacgtggatgacgaattgaagttgaggattagagagttcgttcaatatttgcttagactaggtgaaaaaaagactggatctagcgaaaccaggcaaacatttttaagtatagtgaaatcatgttactatgctgctcattgcccacctcatgtcgttgatagacacattagtagagtgattttcgagccagtaagtgccgcaaagtaaccgcgg

SEQ ID NO: 40 - protein, 827 aa, Zea mays
MVLSSSCTTVPHLSSLAVVQLGPWSSRIKKKTDTVAVPAAAGRWRRALARAQHTSESAAVAKGSSLTPIVRTDAESRRTRWPTDDDDAEPLVDEIRAMLTSMSDGDISVSAYDTAWVGLVPRLDGGEGPQFPAAVRWIRNNQLPDGSWGDAALFSAYDRLINTLACVVTLTRWSLEPEMRGRGLSFLGRNMWKLATEDEESMPIGFELAFPSLIELAKSLGVHDFPYDHQALQGIYSSREIKMKRIPKEVMHTVPTSILHSLEGMPGLDWAKLLKLQSSDGSFLFSPAATAYALMNTGDDRCFSYIDRTVKKFNGGVPNVYPVDLFEHIWAVDRLERLGISRYFQKEIEQCMDYVNRHWTEDGICWARNSDVKEVDDTAMAFRLLRLHGYSVSPDVFKNFEKDGEFFAFVGQSNQAVTGMYNLNRASQISFPGEDVLHRAGAFSYEFLRRKEAEGALRDKWIISKDLPGEVVYTLDFPWYGNLPRVEARDYLEQYGGGDDVWIGKTLYRMPLVNNDVYLELARMDFNHCQALHQLEWQGLKRWYTENRLMDFGVAQEDALRAYFLAAASVYEPCRAAERLAWARAAILANAVSTHLRNSPSFRERLEHSLRCRPSEETDGSWFNSSSGSDAVLVKAVLRLTDSLAREAQPIHGGDPEDIIHKLLRSAWAEWVREKADAADSVCNGSSAVEQEGSRMVHDKQTCLLLARMIEISAGRAAGEAASEDGDRRIIQLTGSICDSLKQKMLVSQDPEKNEEMMSHVDDELKLRIREFVQYLLRLGEKKTGSSETRQTFLSIVKSCYYAAHCPPHVVDRHISRVIFEPVSAAK

SEQ ID NO: 41 - DNA, 2570 bp, Artificial Sequence
  Codon-optimized CDPS
cttcttcactaaatacttagacagagaaaacagagctttttaaagccatgtctcttcagtatcatgttctaaactccattccaagtacaacctttctcagttctactaaaacaacaatatcttcttctttccttaccatctcaggatctcctctcaatgtcgctagagacaaatccagaagcggttccatacattgttcaaagcttcgaactcaagaatacattaattctcaagaggttcaacatgatttgcctctaatacatgagtggcaacagcttcaaggagaagatgctcctcagattagtgttggaagtaatagtaatgcattcaaagaagcagtgaagagtgtgaaaacgatcttgagaaacctaacggacggggaaattacgatatcggcttacgatacagcttgggttgcattgatcgatgccggagataaaactccggcgtttccctccgccgtgaaatggatcgccgagaaccaactttccgatggttcttggggagatgcgtatctcttctcttatcatgatcgtctcatcaatacccttgcatgcgtcgttgctctaagatcatggaatctctttcctcatcaatgcaacaaaggaatcacgtttttccgggaaaatattgggaagctagaagacgaaaatgatgagcatatgccaatcggattcgaagtagcattcccatcgttgcttgagatagctcgaggaataaacattgatgtaccgtacgattctccggtcttaaaagatatatacgccaagaaagagctaaagcttacaaggataccaaaagagataatgcacaagataccaacaacattgttgcatagtttggaggggatgcgtgatttagattgggaaaagctcttgaaacttcaatctcaagacggatctttcctcttctctccttcctctaccgcttttgcattcatgcagacccgagacagtaactgcctcgagtatttgcgaaatgccgtcaaacgtttcaatggaggagttcccaatgtctttcccgtggatcttttcgagcacatatggatagtggatcggttacaacgtttagggatatcgagatactttgaagaagagattaaagagtgtcttgactatgtccacagatattggaccgacaatggcatatgttgggctagatgttcccatgtccaagacatcgatgatacagccatggcatttaggctcttaagacaacatggataccaagtgtccgcagatgtattcaagaactttgagaaagagggagagtttttctgctttgtggggcaatcaaaccaagcagtaaccggtatgttcaacctataccgggcatcacaattggcgtttccaagggaagagatattgaaaaacgccaaagagttttcttataattatctgctagaaaaacgggagagagaggagttgattgataagtggattataatgaaagacttacctggcgagattgggtttgcgttagagattccatggtacgcaagcttgcctcgagtagagacgagattctatattgatcaatatggtggagaaaacgacgtttggattggcaagactctttataggatgccatacgtgaacaataatggatatctggaattagcaaaacaagattacaacaattgccaagctcagcatcagctcgaatgggacatattccaaaagtggtatgaagaaaataggttaagtgagtggggtgtgcgcagaagtgagcttctcgagtgttactacttagcggctgcaactatatttgaatcagaaaggtcacatgagagaatggtttgggctaagtcaagtgtattggttaaagccatttcttcttcttttggggaatcctctgactccagaagaagcttctccgatcagtttcatgaatacattgccaatgctcgacgaagtgatcatcactttaatgacaggaacatgagattggaccgaccaggatcggttcaggccagtcggcttgccggagtgttaatcgggactttgaatcaaatgtcttttgaccttttcatgtctcatggccgtgacgttaacaatctcctctatctatcgtggggagattggatggaaaaatggaaactatatggagatgaaggagaaggagagctcatggtgaagatgataattctaatgaagaacaatgacctaactaacttcttcacccacactcacttcgttcgtctcgcggaaatcatcaatcgaatctgtcttcctcgccaatacttaaaggcaaggagaaacgatgagaaggagaagacaataaagagtatggagaaggagatggggaaaatggttgagttagcattgtcggagagtgacacatttcgtgacgtcagcatcacgtttcttgatgtagcaaaagcattttactactttgctttatgtggcgatcatctccaaactcacatctccaaagtcttgtttcaaaaagtctagtaacctcatcatcatcatcgatccattaacaatcagtggatcgatgtatccatagatgcgtgaataatatttcatgtagagaaggagaacaaattagatcatgtagggttatca

SEQ ID NO: 42 - protein, 802 aa, Arabidopsis thaliana
MSLQYHVLNSIPSTTFLSSTKTTISSSFLTISGSPLNVARDKSRSGSIHCSKLRTQEYINSQEVQHDLPLIHEWQQLQGEDAPQISVGSNSNAFKEAVKSVKTILRNLTDGEITISAYDTAWVALIDAGDKTPAFPSAVKWIAENQLSDGSWGDAYLFSYHDRLINTLACVVALRSWNLFPHQCNKGITFFRENIGKLEDENDEHMPIGFEVAFPSLLEIARGINIDVPYDSPVLKDIYAKKELKLTRIPKEIMHKIPTTLLHSLEGMRDLDWEKLLKLQSQDGSFLFSPSSTAFAFMQTRDSNCLEYLRNAVKRFNGGVPNVFPVDLFEHIWIVDRLQRLGISRYFEEEIKECLDYVHRYWTDNGICWARCSHVQDIDDTAMAFRLLRQHGYQVSADVFKNFEKEGEFFCFVGQSNQAVTGMFNLYRASQLAFPREEILKNAKEFSYNYLLEKREREELIDKWIIMKDLPGEIGFALEIPWYASLPRVETRFYIDQYGGENDVWIGKTLYRMPYVNNNGYLELAKQDYNNCQAQHQLEWDIFQKWYEENRLSEWGVRRSELLECYYLAAATIFESERSHERMVWAKSSVLVKAISSSFGESSDSRRSFSDQFHEYIANARRSDHHFNDRNMRLDRPGSVQASRLAGVLIGTLNQMSFDLFMSHGRDVNNLLYLSWGDWMEKWKLYGDEGEGELMVKMIILMKNNDLTNFFTHTHFVRLAEIINRICLPRQYLKARRNDEKEKTIKSMEKEMGKMVELALSESDTFRDVSITFLDVAKAFYYFALCGDHLQTHISKVLFQKV

SEQ ID NO: 43 - DNA, 2355 bp, Artificial Sequence
  Codon-optimized KS
atgaatttgagtttgtgtatagcatctccactattgaccaaatctaatagaccagctgctttatcagcaattcatacagctagtacatcccatggtggccaaaccaaccctacgaatctgataatcgatacgaccaaggagagaatacaaaaacaattcaaaaatgttgaaatttcagtttcttcttatgatactgcgtgggttgccatggttccatcacctaattctccaaagtctccatgtttcccagaatgtttgaattggctgattaacaaccagttgaatgatggatcttggggtttagtcaatcacacgcacaatcacaaccatccacttttgaaagattctttatcctcaactttggcttgcatcgtggccctaaagagatggaacgtaggtgaggatcagattaacaaggggcttagtttcattgaatctaacttggcttccgcgactgaaaaatctcaaccatctccaataggattcgatatcatctttccaggtctgttagagtacgccaaaaatctagatatcaacttactgtctaagcaaactgatttctcactaatgttacacaagagagaattagaacaaaagagatgtcattcaaacgaaatggatggttacctagcttatatctctgaaggtcttggtaatctttacgattggaatatggtgaaaaagtaccagatgaaaaatggctcagttttcaattccccttctgcaactgcggcagcattcattaaccatcaaaatccaggatgcctgaactatttgaattcactactagacaaattcggcaacgcagttccaactgtataccctcacgatttgtttatcagattgagtatggtggatacaattgaaagacttggtatatcccaccactttagagtcgagatcaaaaatgttttggatgagacataccgttgttgggtggagagagatgaacaaatctttatggatgttgtgacgtgcgcgttggcctttagattgttgcgtattaacggttacgaagttagtccagatccacttgccgaaattacaaacgaattagctttaaaggatgaatacgccgctcttgaaacatatcatgcgtcacatatcctttaccaagaggacttatcatctggaaaacaaattcttaaatctgctgatttcctgaaggaaatcatatccactgatagtaatagactgtccaaactgatccataaagaggttgaaaatgcacttaagttccctattaacaccggcttagaacgtattaacacaagacgtaacatccagctttacaacgtagacaatactagaatcttgaaaaccacttaccattcttccaacatatcaaacactgattacctaagattagctgttgaagatttctacacatgtcagtctatctatagagaagagctgaaaggattagagagatgggtcgttgagaataagctagatcaattgaaatttgccagacaaaagacagcttattgttacttctcagttgccgccactttatcaagtccagaattgtcagatgcacgtatttcttgggctaaaaacggaattttgacaactgttgttgatgatttctttgatattggcgggacaatcgacgaattgacaaacctgattcaatgcgttgaaaagtggaatgtcgatgtcgataaagactgttgctcagaacatgttagaatactgttcttggctctgaaagatgctatctgttggatcggggatgaggctttcaaatggcaagctagagatgtgacgtctcacgtcattcaaacctggctagaactgatgaactctatgttgagagaagcaatttggactagagatgcatacgttcctacattaaacgagtatatggaaaacgcttatgtctcctttgctttgggtcctatcgttaagcctgccatatactttgtaggaccaaagctatccgaggaaatcgtcgaatcatcagaataccataacttgttcaagttaatgtccacacaaggcagattacttaatgatattcattctttcaaaagagagtttaaggaaggaaagttaaatgctgttgctctgcatctttctaatggcgaaagtggtaaagtcgaagaggaagtagttgaggaaatgatgatgatgatcaaaaacaagagaaaggagttgatgaaactaatcttcgaagagaacggttcaattgttcctagagcatgtaaggatgcattttggaacatgtgtcatgtgctaaactttttctacgcaaacgacgatggttttactgggaacacaatactagatacagtaaaagacatcatatacaaccctttggtcttagtaaacgaaaacgaggagcaaagataa

SEQ ID NO: 44 - protein, 784 aa, Stevia rebaudiana
MNLSLCIASPLLTKSNRPAALSAIHTASTSHGGQTNPTNLIIDTTKERIQKQFKNVEISVSSYDTAWVAMVPSPNSPKSPCFPECLNWLINNQLNDGSWGLVNHTHNHNHPLLKDSLSSTLACIVALKRWNVGEDQINKGLSFIESNLASATEKSQPSPIGFDIIFPGLLEYAKNLDINLLSKQTDFSLMLHKRELEQKRCHSNEMDGYLAYISEGLGNLYDWNMVKKYQMKNGSVFNSPSATAAAFINHQNPGCLNYLNSLLDKFGNAVPTVYPHDLFIRLSMVDTIERLGISHHFRVEIKNVLDETYRCWVERDEQIFMDVVTCALAFRLLRINGYEVSPDPLAEITNELALKDEYAALETYHASHILYQEDLSSGKQILKSADFLKEIISTDSNRLSKLIHKEVENALKFPINTGLERINTRRNIQLYNVDNTRILKTTYHSSNISNTDYLRLAVEDFYTCQSIYREELKGLERWVVENKLDQLKFARQKTAYCYFSVAATLSSPELSDARISWAKNGILTTVVDDFFDIGGTIDELTNLIQCVEKWNVDVDKDCCSEHVRILFLALKDAICWIGDEAFKWQARDVTSHVIQTWLELMNSMLREAIWTRDAYVPTLNEYMENAYVSFALGPIVKPAIYFVGPKLSEEIVESSEYHNLFKLMSTQGRLLNDIHSFKREFKEGKLNAVALHLSNGESGKVEEEVVEEMMMMIKNKRKELMKLIFEENGSIVPRACKDAFWNMCHVLNFFYANDDGFTGNTILDTVKDIIYNPLVLVNENEEQR

SEQ ID NO: 45 - DNA, 2355 bp, Artificial Sequence
  Codon-optimized KS
atgaatctgtccctttgtatagctagtccactgttgacaaaatcttctagaccaactgctctttctgcaattcatactgccagtactagtcatggaggtcaaacaaacccaacaaatttgataatcgatactactaaggagagaatccaaaagctattcaaaaatgttgaaatctcagtatcatcttatgacaccgcatgggttgcaatggtgccatcacctaattccccaaaaagtccatgttttccagagtgcttgaattggttaatcaataatcagttaaacgatggttcttggggtttagtcaaccacactcataaccacaatcatccattattgaaggactctttatcatcaacattagcctgtattgttgcattgaaaagatggaatgtaggtgaagatcaaatcaacaagggtttatcattcatagaatccaatctagcttctgctaccgacaaatcacaaccatctccaatcgggttcgacataatcttccctggtttgctggagtatgccaaaaaccttgatatcaacttactgtctaaacaaacagatttctctttgatgctacacaaaagagagttagagcagaaaagatgccattctaacgaaattgacgggtacttagcatatatctcagaaggtttgggtaatttgtatgactggaacatggtcaaaaagtatcagatgaaaaatggatccgtattcaattctccttctgcaactgccgcagcattcattaatcatcaaaaccctgggtgtcttaactacttgaactcactattagataagtttggaaatgcagttccaacagtctatcctttggacttgtacatcagattatctatggttgacactatagagagattaggtatttctcatcatttcagagttgagatcaaaaatgttttggacgagacatacagatgttgggtcgaaagagatgagcaaatctttatggatgtcgtgacctgcgctctggcttttagattgctaaggatacacggatacaaagtatctcctgatcaactggctgagattacaaacgaactggctttcaaagacgaatacgccgcattagaaacataccatgcatcccaaatactttaccaggaagacctaagttcaggaaaacaaatcttgaagtctgcagatttcctgaaaggcattctgtctacagatagtaataggttgtctaaattgatacacaaggaagtagaaaacgcactaaagtttcctattaacactggtttagagagaatcaatactaggagaaacattcagctgtacaacgtagataatacaaggattcttaagaccacctaccatagttcaaacatttccaacacctattacttaagattagctgtcgaagacttttacacttgtcaatcaatctacagagaggagttaaagggcctagaaagatgggtagttcaaaacaagttggatcaactgaagtttgctagacagaagacagcatactgttatttctctgttgctgctaccctttcatccccagaattgtctgatgccagaataagttgggccaaaaatggtattcttacaactgtagtcgatgatttctttgatattggaggtactattgatgaactgacaaatcttattcaatgtgttgaaaagtggaacgtggatgtagataaggattgctgcagtgaacatgtgagaatacttttcctggctctaaaagatgcaatatgttggattggcgacgaggccttcaagtggcaagctagagatgttacatctcatgtcatccaaacttggcttgaactgatgaactcaatgctaagagaagcaatctggacaagagatgcatacgttccaacattgaacgaatacatggaaaacgcttacgtctcatttgccttgggtcctattgttaagccagccatatactttgttgggccaaagttatccgaagagattgttgagtcttccgaatatcataacctattcaagttaatgtcaacacaaggcagacttctgaacgatatccactccttcaaaagagaattcaaggaaggtaagctaaacgctgttgctttgcacttgtctaatggtgaatctggcaaagtggaagaggaagtcgttgaggaaatgatgatgatgatcaaaaacaagagaaaggaattgatgaaattgattttcgaggaaaatggttcaatcgtacctagagcttgtaaagatgctttttggaatatgtgccatgttcttaacttcttttacgctaatgatgatggcttcactggaaatacaatattggatacagttaaagatatcatctacaacccacttgttttggtcaatgagaacgaggaacaaagataa

SEQ ID NO: 46 - protein, 784 aa, Stevia rebaudiana
MNLSLCIASPLLTKSSRPTALSAIHTASTSHGGQTNPTNLIIDTTKERIQKLFKNVEISVSSYDTAWVAMVPSPNSPKSPCFPECLNWLINNQLNDGSWGLVNHTHNHNHPLLKDSLSSTLACIVALKRWNVGEDQINKGLSFIESNLASATDKSQPSPIGFDIIFPGLLEYAKNLDINLLSKQTDFSLMLHKRELEQKRCHSNEIDGYLAYISEGLGNLYDWNMVKKYQMKNGSVFNSPSATAAAFINHQNPGCLNYLNSLLDKFGNAVPTVYPLDLYIRLSMVDTIERLGISHHFRVEIKNVLDETYRCWVERDEQIFMDVVTCALAFRLLRIHGYKVSPDQLAEITNELAFKDEYAALETYHASQILYQEDLSSGKQILKSADFLKGILSTDSNRLSKLIHKEVENALKFPINTGLERINTRRNIQLYNVDNTRILKTTYHSSNISNTYYLRLAVEDFYTCQSIYREELKGLERWVVQNKLDQLKFARQKTAYCYFSVAATLSSPELSDARISWAKNGILTTVVDDFFDIGGTIDELTNLIQCVEKWNVDVDKDCCSEHVRILFLALKDAICWIGDEAFKWQARDVTSHVIQTWLELMNSMLREAIWTRDAYVPTLNEYMENAYVSFALGPIVKPAIYFVGPKLSEEIVESSEYHNLFKLMSTQGRLLNDIHSFKREFKEGKLNAVALHLSNGESGKVEEEVVEEMMMMIKNKRKELMKLIFEENGSIVPRACKDAFWNMCHVLNFFYANDDGFTGNTILDTVKDIIYNPLVLVNENEEQR

SEQ ID NO: 47 - DNA, 1773 bp, Artificial Sequence
  Codon-optimized KS
atggctatgccagtgaagctaacacctgcgtcattatccttaaaagctgtgtgctgcagattctcatccggtggccatgctttgagattcgggagtagtctgccatgttggagaaggacccctacccaaagatctacttcttcctctactactagaccagctgccgaagtgtcatcaggtaagagtaaacaacatgatcaggaagctagtgaagcgactatcagacaacaattacaacttgtggatgtcctggagaatatgggaatatccagacattttgctgcagagataaagtgcatactagacagaacttacagatcttggttacaaagacacgaggaaatcatgctggacactatgacatgtgctatggcttttagaatcctaagattgaacggatacaacgtttcatcagatgaactataccacgttgtagaggcatctggtctgcataattctttgggtgggtatcttaacgataccagaacactacttgaattacacaaggcttcaacagttagtatctctgaggatgaatctatcttagattcaattggctctagatccagaacattgcttagagaacaattggagtctggtggcgcactgagaaagccttctttattcaaagaggttgaacatgcactggatggacctttttacaccacacttgatagacttcatcataggtggaatattgaaaacttcaacattattgagcaacacatgttggagactccatacttatctaaccagcatacatcaagggatatcctagcattgtcaattagagatttttcctcctcacaattcacttatcaacaagagctacagcatctggagagttgggttaaggaatgtagattagatcaactacagttcgcaagacagaaattagcgtacttttacctatcagccgcaggcaccatgttttctcctgagctttctgatgcgagaacattatgggccaaaaacggggtgttgacaactattgttgatgatttctttgatgttgccggttctaaagaggaattggaaaacttagtcatgctggtcgaaatgtgggatgaacatcacaaagttgaattctattctgagcaggtcgaaatcatcttctcttccatctacgattctgtcaaccaattgggtgagaaggcctctttggttcaagacagatcaattacaaaacaccttgttgaaatatggttagacttgttaaagtccatgatgacggaagttgaatggagactgtcaaaatacgtgcctacagaaaaggaatacatgattaatgcctctcttatcttcggcctaggtccaatcgttttaccagctttgtatttcgttggtccaaagatttcagaaagtatagtaaaggacccagaatatgatgaattgttcaaactaatgtcaacatgtggtagattgttgaatgacgtgcaaacgttcgaaagagaatacaatgagggtaaactgaattctgtcagtctattggttcttcacggaggcccaatgtctatttcagacgcaaagaggaaattacaaaagcctattgatacgtgtagaagagatcttctttctttggtccttagagaagagtctgtagtaccaagaccatgtaaggaactattctggaaaatgtgtaaagtgtgctatttcttttactcaacaactgatgggttttctagtcaagtcgaaagagcaaaagaggtagacgctgtcataaatgagccactgaagttgcaaggttctcatacactggtatctgatgtttaa

SEQ ID NO: 48 - protein, 590 aa, Zea mays
MAMPVKLTPASLSLKAVCCRFSSGGHALRFGSSLPCWRRTPTQRSTSSSTTRPAAEVSSGKSKQHDQEASEATIRQQLQLVDVLENMGISRHFAAEIKCILDRTYRSWLQRHEEIMLDTMTCAMAFRILRLNGYNVSSDELYHVVEASGLHNSLGGYLNDTRTLLELHKASTVSISEDESILDSIGSRSRTLLREQLESGGALRKPSLFKEVEHALDGPFYTTLDRLHHRWNIENFNIIEQHMLETPYLSNQHTSRDILALSIRDFSSSQFTYQQELQHLESWVKECRLDQLQFARQKLAYFYLSAAGTMFSPELSDARTLWAKNGVLTTIVDDFFDVAGSKEELENLVMLVEMWDEHHKVEFYSEQVEIIFSSIYDSVNQLGEKASLVQDRSITKHLVEIWLDLLKSMMTEVEWRLSKYVPTEKEYMINASLIFGLGPIVLPALYFVGPKISESIVKDPEYDELFKLMSTCGRLLNDVQTFEREYNEGKLNSVSLLVLHGGPMSISDAKRKLQKPIDTCRRDLLSLVLREESVVPRPCKELFWKMCKVCYFFYSTTDGFSSQVERAKEVDAVINEPLKLQGSHTLVSDV

SEQ ID NO: 49 - DNA, 2232 bp, Artificial Sequence
  Codon-optimized KS
atgcagaacttccatggtacaaaggaaaggatcaaaaagatgtttgacaagattgaattgtccgtttcttcttatgatacagcctgggttgcaatggtcccatcccctgattgcccagaaacaccttgttttccagaatgtactaaatggatcctagaaaatcagttgggtgatggtagttggtcacttcctcatggcaatccacttctagttaaagatgcattatcttccactcttgcttgtattctggctcttaaaagatggggaatcggtgaggaacagattaacaaaggactgagattcatagaactcaactctgctagtgtaaccgataacgaacaacacaaaccaattggatttgacattatctttccaggtatgattgaatacgctatagacttagacctgaatctaccactaaaaccaactgacattaactccatgttgcatcgtagagcccttgaattgacatcaggtggaggcaaaaatctagaaggtagaagagcttacttggcctacgtctctgaaggaatcggtaagctgcaagattgggaaatggctatgaaataccaacgtaaaaacggatctctgttcaatagtccatcaacaactgcagctgcattcatccatatacaagatgctgaatgcctccactatattcgttctcttctccagaaatttggaaacgcagtccctacaatataccctctcgatatctatgccagactttcaatggtagatgccctggaacgtcttggtattgatagacatttcagaaaggagagaaagttcgttctggatgaaacatacagattttggttgcaaggagaagaggagattttctccgataacgcaacctgtgctttggccttcagaatattgagacttaatggttacgatgtctctcttgaagatcacttctctaactctctgggcggttacttaaaggactcaggagcagctttagaactgtacagagccctccaattgtcttacccagacgagtccctcctggaaaagcaaaattctagaacttcttacttcttaaaacaaggtttatccaatgtctccctctgtggtgacagattgcgtaaaaacataattggagaggtgcatgatgctttaaacttttccgaccacgctaacttacaaagattagctattcgtagaaggattaagcattacgctactgacgatacaaggattctaaaaacttcctacagatgctcaacaatcggtaaccaagattttctaaaacttgcagtggaagatttcaatatctgtcaatcaatacaaagagaggaattcaagcatattgaaagatgggtcgttgaaagacgtctagacaagttaaagttcgctagacaaaaagaggcctattgctatttctcagccgcagcaacattgtttgcccctgaattgtctgatgctagaatgtcttgggccaaaaatggtgtattgacaactgtggttgatgatttcttcgatgtcggaggctctgaagaggaattagttaacttgatagaattgatcgagcgttgggatgtgaatggcagtgcagatttttgtagtgaggaagttgagattatctattctgctatccactcaactatctctgaaataggtgataagtcatttggctggcaaggtagagatgtaaagtctcaagttatcaagatctggctggacttattgaaatcaatgttaactgaagctcaatggtcttcaaacaagtctgttcctaccctagatgagtatatgacaaccgcccatgtttcattcgcacttggtccaattgtacttccagccttatacttcgttggcccaaagttgtcagaagaggttgcaggtcatcctgaactactaaacctctacaaagtcacatctacttgtggcagactactgaatgattggagaagttttaagagagaatccgaggaaggtaagctcaacgctattagtttatacatgatccactccggtggtgcttctacagaagaggaaacaatcgaacatttcaaaggtttgattgattctcagagaaggcaactgttacaattggtgttgcaagagaaggatagtatcatacctagaccatgtaaagatctattttggaatatgattaagttattacacactttctacatgaaagatgatggcttcacctcaaatgagatgaggaatgtagttaaggcaatcattaacgaaccaatctcactggatgaattatga

SEQ ID NO: 50 - protein, 775 aa, Populus trichocarpa
MSCIRPWFCPSSISATLTDPASKLVTGEFKTTSLNFHGTKERIKKMFDKIELSVSSYDTAWVAMVPSPDCPETPCFPECTKWILENQLGDGSWSLPHGNPLLVKDALSSTLACILALKRWGIGEEQINKGLRFIELNSASVTDNEQHKPIGFDIIFPGMIEYAKDLDLNLPLKPTDINSMLHRRALELTSGGGKNLEGRRAYLAYVSEGIGKLQDWEMAMKYQRKNGSLFNSPSTTAAAFIHIQDAECLHYIRSLLQKFGNAVPTIYPLDIYARLSMVDALERLGIDRHFRKERKFVLDETYRFWLQGEEEIFSDNATCALAFRILRLNGYDVSLEDHFSNSLGGYLKDSGAALELYRALQLSYPDESLLEKQNSRTSYFLKQGLSNVSLCGDRLRKNIIGEVHDALNFPDHANLQRLAIRRRIKHYATDDTRILKTSYRCSTIGNQDFLKLAVEDFNICQSIQREEFKHIERWVVERRLDKLKFARQKEAYCYFSAAATLFAPELSDARMSWAKNGVLTTVVDDFFDVGGSEEELVNLIELIERWDVNGSADFCSEEVEIIYSAIHSTISEIGDKSFGWQGRDVKSHVIKIWLDLLKSMLTEAQWSSNKSVPTLDEYMTTAHVSFALGPIVLPALYFVGPKLSEEVAGHPELLNLYKVMSTCGRLLNDWRSFKRESEEGKLNAISLYMIHSGGASTEEETIEHFKGLIDSQRRQLLQLVLQEKDSIIPRPCKDLFWNMIKLLHTFYMKDDGFTSNEMRNVVKAIINEPISLDEL

SEQ ID NO: 51 - DNA, 2358 bp, Artificial Sequence
  Codon-optimized KS
atgtctatcaaccttcgctcctccggttgttcgtctccgatctcagctactttggaacgaggattggactcagaagtacagacaagagctaacaatgtgagctttgagcaaacaaaggagaagattaggaagatgttggagaaagtggagctttctgtttcggcctacgatactagttgggtagcaatggttccatcaccgagctcccaaaatgctccacttttcccacagtgtgtgaaatggttattggataatcaacatgaagatggatcttggggacttgataaccatgaccatcaatctcttaagaaggatgtgttatcatctacactggctagtatcctcgcgttaaagaagtggggaattggtgaaagacaaataaacaagggtctccagtttattgagctgaattctgcattagtcactgatgaaaccatacagaaaccaacagggtttgatattatatttcctgggatgattaaatatgctagagatttgaatctgacgattccattgggctcagaagtggtggatgacatgatacgaaaaagagatctggatcttaaatgtgatagtgaaaagttttcaaagggaagagaagcatatctggcctatgttttagaggggacaagaaacctaaaagattgggatttgatagtcaaatatcaaaggaaaaatgggtcactgtttgattctccagccacaacagcagctgcttttactcagtttgggaatgatggttgtctccgttatctctgttctctccttcagaaattcgaggctgcagttccttcagtttatccatttgatcaatatgcacgccttagtataattgtcactcttgaaagcttaggaattgatagagatttcaaaaccgaaatcaaaagcatattggatgaaacctatagatattggcttcgtggggatgaagaaatatgtttggacttggccacttgtgctttggctttccgattattgcttgctcatggctatgatgtgtcttacgatccgctaaaaccatttgcagaagaatctggtttctctgatactttggaaggatatgttaagaatacgttttctgtgttagaattatttaaggctgctcaaagttatccacatgaatcagctttgaagaagcagtgttgttggactaaacaatatctggagatggaattgtccagctgggttaagacctctgttcgagataaatacctcaagaaagaggtcgaggatgctcttgcttttccctcctatgcaagcctagaaagatcagatcacaggagaaaaatactcaatggttctgctgtggaaaacaccagagttacaaaaacctcatatcgtttgcacaatatttgcacctctgatatcctgaagttagctgtggatgacttcaatttctgccagtccatacaccgtgaagaaatggaacgtcttgataggtggattgtggagaatagattgcaggaactgaaatttgccagacagaagctggcttactgttatttctctggggctgcaactttattttctccagaactatctgatgctcgtatatcgtgggccaaaggtggagtacttacaacggttgtagacgacttctttgatgttggagggtccaaagaagaactggaaaacctcatacacttggtcgaaaagtgggatttgaacggtgttcctgagtacagctcagaacatgttgagatcatattctcagttctaagggacaccattctcgaaacaggagacaaagcattcacctatcaaggacgcaatgtgacacaccacattgtgaaaatttggttggatctgctcaagtctatgttgagagaagccgagtggtccagtgacaagtcaacaccaagcttggaggattacatggaaaatgcgtacatatcatttgcattaggaccaattgtcctcccagctacctatctgatcggacctccacttccagagaagacagtcgatagccaccaatataatcagctctacaagctcgtgagcactatgggtcgtcttctaaatgacatacaaggttttaagagagaaagcgcggaagggaagctgaatgcggtttcattgcacatgaaacacgagagagacaatcgcagcaaagaagtgatcatagaatcgatgaaaggtttagcagagagaaagagggaagaattgcataagctagttttggaggagaaaggaagtgtggttccaagggaatgcaaagaagcgttcttgaaaatgagcaaagtgttgaacttattttacaggaaggacgatggattcacatcaaatgatctgatgagtcttgttaaatcagtgatctacgagcctgttagcttacagaaagaatctttaacttga

SEQ ID NO: 52 - protein, 785 aa, Arabidopsis thaliana
MSINLRSSGCSSPISATLERGLDSEVQTRANNVSFEQTKEKIRKMLEKVELSVSAYDTSWVAMVPSPSSQNAPLFPQCVKWLLDNQHEDGSWGLDNHDHQSLKKDVLSSTLASILALKKWGIGERQINKGLQFIELNSALVTDETIQKPTGFDIIFPGMIKYARDLNLTIPLGSEVVDDMIRKRDLDLKCDSEKFSKGREAYLAYVLEGTRNLKDWDLIVKYQRKNGSLFDSPATTAAAFTQFGNDGCLRYLCSLLQKFEAAVPSVYPFDQYARLSIIVTLESLGIDRDFKTEIKSILDETYRYWLRGDEEICLDLATCALAFRLLLAHGYDVSYDPLKPFAEESGFSDTLEGYVKNTFSVLELFKAAQSYPHESALKKQCCWTKQYLEMELSSWVKTSVRDKYLKKEVEDALAFPSYASLERSDHRRKILNGSAVENTRVTKTSYRLHNICTSDILKLAVDDFNFCQSIHREEMERLDRWIVENRLQELKFARQKLAYCYFSGAATLFSPELSDARISWAKGGVLTTVVDDFFDVGGSKEELENLIHLVEKWDLNGVPEYSSEHVEIIFSVLRDTILETGDKAFTYQGRNVTHHIVKIWLDLLKSMLREAEWSSDKSTPSLEDYMENAYISFALGPIVLPATYLIGPPLPEKTVDSHQYNQLYKLVSTMGRLLNDIQGFKRESAEGKLNAVSLHMKHERDNRSKEVIIESMKGLAERKREELHKLVLEEKGSVVPRECKEAFLKMSKVLNLFYRKDDGFTSNDLMSLVKSVIYEPVSLQKESLT

SEQ ID NO: 53 - DNA, 2952 bp, Artificial Sequence
  Codon-optimized CDPS-KS
atggaatttgatgaaccattggttgacgaagcaagatctttagtgcagcgtactttacaagattatgatgacagatacggcttcggtactatgtcatgtgctgcttatgatacagcctgggtgtctttagttacaaaaacagtcgatgggagaaaacaatggcttttcccagagtgttttgaatttctactagaaacacaatctgatgccggaggatgggaaatcgggaattcagcaccaatcgacggtatattgaatacagctgcatccttacttgctctaaaacgtcacgttcaaactgagcaaatcatccaacctcaacatgaccataaggatctagcaggtagagctgaacgtgccgctgcatctttgagagcacaattggctgcattggatgtgtctacaactgaacacgtcggttttgagataattgttcctgcaatgctagacccattagaagccgaagatccatctctagttttcgattttccagctaggaaacctttgatgaagattcatgatgctaagatgagtagattcaggccagaatacttgtatggcaaacaaccaatgaccgccttacattcattagaggctttcataggcaaaatcgacttcgataaggtaagacaccaccgtacccatgggtctatgatgggttctccttcatctaccgcagcctacttaatgcacgcttcacaatgggatggtgactcagaggcttaccttagacacgtgattaaacacgcagcagggcagggaactggtgctgtaccatctgctttcccatcaacacattttgagtcatcttggattcttaccacattgtttagagctggattttcagcttctcatcttgcctgtgatgagttgaacaagttggtcgagatacttgagggctcattcgagaaggaaggtggggcaatcggttacgctccagggtttcaagcagatgttgatgatactgctaaaacaataagtacattagcagtccttggaagagatgctacaccaagacaaatgatcaaggtatttgaagctaatacacattttagaacataccctggtgaaagagatccttctttgacagctaattgtaatgctctatcagccttactacaccaaccagatgcagcaatgtatggatctcaaattcaaaagattaccaaatttgtctgtgactattggtggaagtctgatggtaagattaaagataagtggaacacttgctacttgtacccatctgtcttattagttgaggttttggttgatcttgttagtttattggagcagggtaaattgcctgatgttttggatcaagagcttcaatacagagtcgccatcacattgttccaagcatgtttaaggccattactagaccaagatgccgaaggatcatggaacaagtctatcgaagccacagcctacggcatccttatcctaactgaagctaggagagtttgtttcttcgacagattgtctgagccattgaatgaggcaatccgtagaggtatcgctttcgccgactctatgtctggaactgaagctcagttgaactacatttggatcgaaaaggttagttacgcacctgcattattgactaaatcctatttgttagcagcaagatgggctgctaagtctcctttaggcgcttccgtaggctcttctttgtggactccaccaagagaaggattggataagcatgtcagattattccatcaagctgagttattcagatcccttccagaatgggaattaagagcctccatgattgaagcagctttgttcacaccacttctaagagcacatagactagacgttttccctagacaagatgtaggtgaagacaaatatcttgatgtagttccattcttttggactgccgctaacaacagagatagaacttacgcttccactctattcctttacgatatgtgttttatcgcaatgttaaacttccagttagacgaattcatggaggccacagccggtatcttattcagagatcatatggatgatttgaggcaattgattcatgatcttttggcagagaaaacttccccaaagagttctggtagaagtagtcagggcacaaaagatgctgactcaggtatagaggaagacgtgtcaatgtccgattcagcttcagattcccaggatagaagtccagaatacgacttggttttcagtgcattgagtacctttacaaaacatgtcttgcaacacccatctatacaaagtgcctctgtatgggatagaaaactacttgctagagagatgaaggcttacttacttgctcatatccaacaagcagaagattcaactccattgtctgaattgaaagatgtgcctcaaaagactgatgtaacaagagtttctacatctactactaccttctttaactgggttagaacaacttccgcagaccatatatcctgcccatactccttccactttgtagcatgccatctaggcgcagcattgtcacctaaagggtctaacggtgattgctatccttcagctggtgagaagttcttggcagctgcagtctgcagacatttggccaccatgtgtagaatgtacaacgatcttggatcagctgaacgtgattctgatgaaggtaatttgaactccttggacttccctgaattcgccgattccgcaggaaacggagggatagaaattcagaaggccgctctattaaggttagctgagtttgagagagattcatacttagaggccttccgtcgtttacaagatgaatccaatagagttcacggtccagccggtggtgatgaagccagattgtccagaaggagaatggcaatccttgaattcttcgcccagcaggtagatttgtacggtcaagtatacgtcattagggatatttccgctcgtattcctaaaaacgaggttgagaaaaagagaaaattggatgatgctttcaattga

SEQ ID NO: 54 - protein, 983 aa, Phomopsis amygdali
MEFDEPLVDEARSLVQRTLQDYDDRYGFGTMSCAAYDTAWVSLVTKTVDGRKQWLFPECFEFLLETQSDAGGWEIGNSAPIDGILNTAASLLALKRHVQTEQIIQPQHDHKDLAGRAERAAASLRAQLAALDVSTTEHVGFEIIVPAMLDPLEAEDPSLVFDFPARKPLMKIHDAKMSRFRPEYLYGKQPMTALHSLEAFIGKIDFDKVRHHRTHGSMMGSPSSTAAYLMHASQWDGDSEAYLRHVIKHAAGQGTGAVPSAFPSTHFESSWILTTLFRAGFSASHLACDELNKLVEILEGSFEKEGGAIGYAPGFQADVDDTAKTISTLAVLGRDATPRQMIKVFEANTHFRTYPGERDPSLTANCNALSALLHQPDAAMYGSQIQKITKFVCDYWWKSDGKIKDKWNTCYLYPSVLLVEVLVDLVSLLEQGKLPDVLDQELQYRVAITLFQACLRPLLDQDAEGSWNKSIEATAYGILILTEARRVCFFDRLSEPLNEAIRRGIAFADSMSGTEAQLNYIWIEKVSYAPALLTKSYLLAARWAAKSPLGASVGSSLWTPPREGLDKHVRLFHQAELFRSLPEWELRASMIEAALFTPLLRAHRLDVFPRQDVGEDKYLDVVPFFWTAANNRDRTYASTLFLYDMCFIAMLNFQLDEFMEATAGILFRDHMDDLRQLIHDLLAEKTSPKSSGRSSQGTKDADSGIEEDVSMSDSASDSQDRSPEYDLVFSALSTFTKHVLQHPSIQSASVWDRKLLAREMKAYLLAHIQQAEDSTPLSELKDVPQKTDVTRVSTSTTTFFNWVRTTSADHISCPYSFHFVACHLGAALSPKGSNGDCYPSAGEKFLAAAVCRHLATMCRMYNDLGSAERDSDEGNLNSLDFPEFADSAGNGGIEIQKAALLRLAEFERDSYLEAFRRLQDESNRVHGPAGGDEARLSRRRMAILEFFAQQVDLYGQVYVIRDISARIPKNEVEKKRKLDDAFN

SEQ ID NO: 55 - DNA, 2646 bp, Artificial Sequence
  Codon-optimized CDPS-KS
atggcttctagtacacttatccaaaacagatcatgtggcgtcacatcatctatgtcaagttttcaaatcttcagaggtcaaccactaagatttcctggcactagaaccccagctgcagttcaatgcttgaaaaagaggagatgccttaggccaaccgaatccgtactagaatcatctcctggctctggttcatatagaatagtaactggcccttctggaattaaccctagttctaacgggcacttgcaagagggttccttgactcacaggttaccaataccaatggaaaaatctatcgataacttccaatctactctatatgtgtcagatatttggtctgaaacactacagagaactgaatgtttgctacaagtaactgaaaacgtccagatgaatgagtggattgaggaaattagaatgtactttagaaatatgactttaggtgaaatttccatgtccccttacgacactgcttgggtggctagagttccagcgttggacggttctcatgggcctcaattccacagatctttgcaatggattatcgacaaccaattaccagatggggactggggcgaaccttctcttttcttgggttacgatagagtttgtaatactttagcctgtgtgattgcgttgaaaacatggggtgttggggcacaaaacgttgaaagaggaattcagttcctacaatctaacatatacaagatggaggaagatgacgctaatcatatgccaataggattcgaaatcgtattccctgctatgatggaagatgccaaagcattaggtttggatttgccatacgatgctactattttgcaacagatttcagccgaaagagagaaaaagatgaaaaagatcccaatggcaatggtgtacaaatacccaaccactttacttcactccttagaaggcttgcatagagaagttgattggaataagttgttacaattacaatctgaaaatggtagttttctttattcacctgcttcaaccgcatgcgccttaatgtacactaaggacgttaaatgttttgattacttaaaccagttgttgatcaagttcgaccacgcatgcccaaatgtatatccagtcgatctattcgaaagattatggatggttgacagattgcagagattagggatctccagatactttgaaagagagattagagattgtttacaatacgtctacagatattggaaagattgtggaatcggatgggcttctaactcttccgtacaagatgttgatgatacagccatggcgtttagacttttaaggactcatggtttcgacgtaaaggaagattgctttagacagtttttcaaggacggagaattcttctgcttcgcaggccaatcatctcaagcagttacaggcatgtttaatctttcaagagccagtcaaacattgtttccaggagaatctttattgaaaaaggctagaaccttctctagaaacttcttgagaacaaagcatgagaacaacgaatgtttcgataaatggatcattactaaagatttggctggtgaagtcgagtataacttgaccttcccatggtatgcctctttgcctagattagaacataggacatacttagatcaatatggaatcgatgatatctggataggcaaatctttatacaaaatgcctgctgttaccaacgaagttttcctaaagttggcaaaggcagactttaacatgtgtcaagctctacacaaaaaggaattggaacaagtgataaagtggaacgcgtcctgtcaattcagagatcttgaattcgccagacaaaaatcagtagaatgctattttgctggtgcagccacaatgttcgaaccagaaatggttcaagctagattagtctgggcaagatgttgtgtattgacaactgtcttagacgattactttgaccacgggacacctgttgaggaacttagagtgtttgttcaagctgtcagaacatggaatccagagttgatcaacggtttgccagagcaagctaaaatcttgtttatgggcttatacaaaacagttaacacaattgcagaggaagcattcatggcacagaaaagagacgtccatcatcatttgaaacactattgggacaagttgataacaagtgccctaaaggaggccgaatgggcagagtcaggttacgtcccaacatttgatgaatacatggaagtagctgaaatttctgttgctctagaaccaattgtctgtagtaccttgttctttgcgggtcatagactagatgaggatgttctagatagttacgattaccatctagttatgcatttggtaaacagagtcggtagaatcttgaatgatatacaaggcatgaagagggaggcttcacaaggtaagatctcatcagttcaaatctacatggaggaacatccatctgttccatctgaggccatggcgatcgctcatcttcaagagttagttgataattcaatgcagcaattgacatacgaagttcttaggttcactgcggttccaaaaagttgtaagagaatccacttgaatatggctaaaatcatgcatgccttctacaaggatactgatggattctcatcccttactgcaatgacaggattcgtcaaaaaggttcttttcgaacctgtgcctgagtaa

SEQ ID NO: 56 - protein, 881 aa, Physcomitrella patens
MASSTLIQNRSCGVTSSMSSFQIFRGQPLRFPGTRTPAAVQCLKKRRCLRPTESVLESSPGSGSYRIVTGPSGINPSSNGHLQEGSLTHRLPIPMEKSIDNFQSTLYVSDIWSETLQRTECLLQVTENVQMNEWIEEIRMYFRNMTLGEISMSPYDTAWVARVPALDGSHGPQFHRSLQWIIDNQLPDGDWGEPSLFLGYDRVCNTLACVIALKTWGVGAQNVERGIQFLQSNIYKMEEDDANHMPIGFEIVFPAMMEDAKALGLDLPYDATILQQISAEREKKMKKIPMAMVYKYPTTLLHSLEGLHREVDWNKLLQLQSENGSFLYSPASTACALMYTKDVKCFDYLNQLLIKFDHACPNVYPVDLFERLWMVDRLQRLGISRYFEREIRDCLQYVYRYWKDCGIGWASNSSVQDVDDTAMAFRLLRTHGFDVKEDCFRQFFKDGEFFCFAGQSSQAVTGMFNLSRASQTLFPGESLLKKARTFSRNFLRTKHENNECFDKWIITKDLAGEVEYNLTFPWYASLPRLEHRTYLDQYGIDDIWIGKSLYKMPAVTNEVFLKLAKADFNMCQALHKKELEQVIKWNASCQFRDLEFARQKSVECYFAGAATMFEPEMVQARLVWARCCVLTTVLDDYFDHGTPVEELRVFVQAVRTWNPELINGLPEQAKILFMGLYKTVNTIAEEAFMAQKRDVHHHLKHYWDKLITSALKEAEWAESGYVPTFDEYMEVAEISVALEPIVCSTLFFAGHRLDEDVLDSYDYHLVMHLVNRVGRILNDIQGMKREASQGKISSVQIYMEEHPSVPSEAMAIAHLQELVDNSMQQLTYEVLRFTAVPKSCKRIHLNMAKIMHAFYKDTDGFSSLTAMTGFVKKVLFEPVPE

SEQ ID NO: 57 - DNA, 2859 bp, Artificial Sequence
  Codon-optimized CDPS-KS
atgcctggtaaaattgaaaatggtaccccaaaggacctcaagactggaaatgattttgtttctgctgctaagagtttactagatcgagctttcaaaagtcatcattcctactacggattatgctcaacttcatgtcaagtttatgatacagcttgggttgcaatgattccaaaaacaagagataatgtaaaacagtggttgtttccagaatgtttccattacctcttaaaaacacaagccgcagatggctcatggggttcattgcctacaacacagacagcgggtatcctagatacagcctcagctgtgctggcattattgtgccacgcacaagagcctttacaaatattggatgtatctccagatgaaatggggttgagaatagaacacggtgtcacatccttgaaacgtcaattagcagtttggaatgatgtggaggacaccaaccatattggcgtcgagtttatcataccagccttactttccatgctagaaaaggaattagatgttccatcttttgaatttccatgtaggtccatcttagagagaatgcacggggagaaattaggtcatttcgacctggaacaagtttacggcaagccaagctcattgttgcactcattggaagcatttctcggtaagctagattttgatcgactatcacatcacctataccacggcagtatgatggcatctccatcttcaacggctgcttatcttattggggctacaaaatgggatgacgaagccgaagattacctaagacatgtaatgcgtaatggtgcaggacatgggaatggaggtatttctggtacatttccaactactcatttcgaatgtagctggattatagcaacgttgttaaaggttggctttactttgaagcaaattgacggcgatggcttaagaggtttatcaaccatcttacttgaggcgcttcgtgatgagaatggtgtcataggctttgcccctagaacagcagatgtagatgacacagccaaagctctattggccttgtcattggtaaaccagccagtgtcacctgatatcatgattaaggtctttgagggcaaagaccattttaccacttttggttcagaaagagatccatcattgacttccaacctgcacgtccttttatctttacttaaacaatctaacttgtctcaataccatcctcaaatcctcaaaacaacattattcacttgtagatggtggtggggttccgatcattgtgtcaaagacaaatggaatttgagtcacctatatccaactatgttgttggttgaagccttcactgaagtgctccatctcattgacggtggtgaattgtctagtctgtttgatgaatcctttaagtgtaagattggtcttagcatctttcaagcggtacttagaataatcctcacccaagacaacgacggctcttggagaggatacagagaacagacgtgttacgcaatattggctttagttcaagcgagacatgtatgctttttcactcacatggttgacagactgcaatcatgtgttgatcgaggtttctcatggttgaaatcttgctcttttcattctcaagacctgacttggacctctaaaacagcttatgaagtgggtttcgtagctgaagcatataaactagctgctttacaatctgcttccctggaggttcctgctgccaccattggacattctgtcacgtctgccgttccatcaagtgatcttgaaaaatacatgagattggtgagaaaaactgcgttattctctccactggatgagtggggtctaatggcttctatcatcgaatcttcatttttcgtaccattactgcaggcacaaagagttgaaatataccctagagataatatcaaggtggacgaagataagtacttgtctattatcccattcacatgggtcggatgcaataataggtctagaactttcgcaagtaacagatggctatacgatatgatgtacctttcattactcggctatcaaaccgacgagtacatggaagctgtagctgggccagtgtttggggatgtttccttgttacatcaaacaattgataaggtgattgataatacaatgggtaaccttgcgagagccaatggaacagtacacagtggtaatggacatcagcacgaatctcctaatataggtcaagtcgaggacaccttgactcgtttcacaaattcagtcttgaatcacaaagacgtccttaactctagctcatctgatcaagatactttgagaagagagtttagaacattcatgcacgctcatataacacaaatcgaagataactcacgattcagtaagcaagcctcatccgatgcgttttcctctcctgaacaatcttactttcaatgggtgaactcaactggtggctcacatgtcgcttgcgcctattcatttgccttctctaattgcctcatgtctgcaaatttgttgcagggtaaagacgcatttccaagcggaacgcaaaagtacttaatctcctctgttatgagacatgccacaaacatgtgtagaatgtataacgactttggctctattgccagagacaacgctgagagaaatgttaatagtattcattttcctgagtttactctctgtaacggaacttctcaaaacctagatgaaaggaaggaaagacttctgaaaatcgcaacttacgaacaagggtatttggatagagcactagaggccttggaaagacagagtagagatgatgccggagacagagctggatctaaagatatgagaaagttgaaaatcgttaagttattctgtgatgttacggacttatacgatcagctctacgttatcaaagatttgtcatcctctatgaagtaa

SEQ ID NO: 58 - protein, 952 aa, Gibberella fujikuroi
MPGKIENGTPKDLKTGNDFVSAAKSLLDRAFKSHHSYYGLCSTSCQVYDTAWVAMIPKTRDNVKQWLFPECFHYLLKTQAADGSWGSLPTTQTAGILDTASAVLALLCHAQEPLQILDVSPDEMGLRIEHGVTSLKRQLAVWNDVEDTNHIGVEFIIPALLSMLEKELDVPSFEFPCRSILERMHGEKLGHFDLEQVYGKPSSLLHSLEAFLGKLDFDRLSHHLYHGSMMASPSSTAAYLIGATKWDDEAEDYLRHVMRNGAGHGNGGISGTFPTTHFECSWIIATLLKVGFTLKQIDGDGLRGLSTILLEALRDENGVIGFAPRTADVDDTAKALLALSLVNQPVSPDIMIKVFEGKDHFTTFGSERDPSLTSNLHVLLSLLKQSNLSQYHPQILKTTLFTCRWWWGSDHCVKDKWNLSHLYPTMLLVEAFTEVLHLIDGGELSSLFDESFKCKIGLSIFQAVLRIILTQDNDGSWRGYREQTCYAILALVQARHVCFFTHMVDRLQSCVDRGFSWLKSCSFHSQDLTWTSKTAYEVGFVAEAYKLAALQSASLEVPAATIGHSVTSAVPSSDLEKYMRLVRKTALFSPLDEWGLMASIIESSFFVPLLQAQRVEIYPRDNIKVDEDKYLSIIPFTWVGCNNRSRTFASNRWLYDMMYLSLLGYQTDEYMEAVAGPVFGDVSLLHQTIDKVIDNTMGNLARANGTVHSGNGHQHESPNIGQVEDTLTRFTNSVLNHKDVLNSSSSDQDTLRREFRTFMHAHITQIEDNSRFSKQASSDAFSSPEQSYFQWVNSTGGSHVACAYSFAFSNCLMSANLLQGKDAFPSGTQKYLISSVMRHATNMCRMYNDFGSIARDNAERNVNSIHFPEFTLCNGTSQNLDERKERLLKIATYEQGYLDRALEALERQSRDDAGDRAGSKDMRKLKIVKLFCDVTDLYDQLYVIKDLSSSMK

SEQ ID NO: 59 - DNA, 1542 bp, Artificial Sequence
  Codon-optimized KO
atggatgctgtgacgggtttgttaactgtcccagcaaccgctataactattggtggaactgctgtagcattggcggtagcgctaatcttttggtacctgaaatcctacacatcagctagaagatcccaatcaaatcatcttccaagagtgcctgaagtcccaggtgttccattgttaggaaatctgttacaattgaaggagaaaaagccatacatgacttttacgagatgggcagcgacatatggacctatctatagtatcaaaactggggctacaagtatggttgtggtatcatctaatgagatagccaaggaggcattggtgaccagattccaatccatatctacaaggaacttatctaaagccctgaaagtacttacagcagataagacaatggtcgcaatgtcagattatgatgattatcataaaacagttaagagacacatactgaccgccgtcttgggtcctaatgcacagaaaaagcatagaattcacagagatatcatgatggataacatatctactcaacttcatgaattcgtgaaaaacaacccagaacaggaagaggtagaccttagaaaaatctttcaatctgagttattcggcttagctatgagacaagccttaggaaaggatgttgaaagtttgtacgttgaagacctgaaaatcactatgaatagagacgaaatctttcaagtccttgttgttgatccaatgatgggagcaatcgatgttgattggagagacttctttccatacctaaagtgggtcccaaacaaaaagttcgaaaatactattcaacaaatgtacatcagaagagaagctgttatgaaatctttaatcaaagagcacaaaaagagaatagcgtcaggcgaaaagctaaatagttatatcgattaccttttatctgaagctcaaactttaaccgatcagcaactattgatgtccttgtgggaaccaatcattgaatcttcagatacaacaatggtcacaacagaatgggcaatgtacgaattagctaaaaaccctaaattgcaagataggttgtacagagacattaagtccgtctgtggatctgaaaagataaccgaagagcatctatcacagctgccttacattacagctattttccacgaaacactgagaagacactcaccagttcctatcattcctctaagacatgtacatgaagataccgttctaggcggctaccatgttcctgctggcacagaacttgccgttaacatctacggttgcaacatggacaaaaacgtttgggaaaatccagaggaatggaacccagaaagattcatgaaagagaatgagacaattgattttcaaaagacgatggccttcggtggtggtaagagagtttgtgctggttccttgcaagcccttttaactgcatctattgggattgggagaatggttcaagagttcgaatggaaactgaaggatatgactcaagaggaagtgaacacgataggcctaactacacaaatgttaagaccattgagagctattatcaaacctaggatctaa

SEQ ID NO: 60 - protein, 513 aa, Stevia rebaudiana
MDAVTGLLTVPATAITIGGTAVALAVALIFWYLKSYTSARRSQSNHLPRVPEVPGVPLLGNLLQLKEKKPYMTFTRWAATYGPIYSIKTGATSMVVVSSNEIAKEALVTRFQSISTRNLSKALKVLTADKTMVAMSDYDDYHKTVKRHILTAVLGPNAQKKHRIHRDIMMDNISTQLHEFVKNNPEQEEVDLRKIFQSELFGLAMRQALGKDVESLYVEDLKITMNRDEIFQVLVVDPMMGAIDVDWRDFFPYLKWVPNKKFENTIQQMYIRREAVMKSLIKEHKKRIASGEKLNSYIDYLLSEAQTLTDQQLLMSLWEPIIESSDTTMVTTEWAMYELAKNPKLQDRLYRDIKSVCGSEKITEEHLSQLPYITAIFHETLRRHSPVPIIPLRHVHEDTVLGGYHVPAGTELAVNIYGCNMDKNVWENPEEWNPERFMKENETIDFQKTMAFGGGKRVCAGSLQALLTASIGIGRMVQEFEWKLKDMTQEEVNTIGLTTQMLRPLRAIIKPRI

SEQ ID NO: 61 - DNA, 1566 bp, Artificial Sequence
  Codon-optimized KO
aagcttactagtaaaatggacggtgtcatcgatatgcaaaccattccattgagaaccgctattgctattggtggtactgctgttgctttggttgttgcattatacttttggttcttgagatcctacgcttccccatctcatcattctaatcatttgccaccagtacctgaagttccaggtgttccagttttgggtaatttgttgcaattgaaagaaaaaaagccttacatgaccttcaccaagtgggctgaaatgtatggtccaatctactctattagaactggtgctacttccatggttgttgtctcttctaacgaaatcgccaaagaagttgttgttaccagattcccatctatctctaccagaaaattgtcttacgccttgaaggttttgaccgaagataagtctatggttgccatgtctgattatcacgattaccataagaccgtcaagagacatattttgactgctgttttgggtccaaacgcccaaaaaaagtttagagcacatagagacaccatgatggaaaacgtttccaatgaattgcatgccttcttcgaaaagaacccaaatcaagaagtcaacttgagaaagatcttccaatcccaattattcggtttggctatgaagcaagccttgggtaaagatgttgaatccatctacgttaaggatttggaaaccaccatgaagagagaagaaatcttcgaagttttggttgtcgatccaatgatgggtgctattgaagttgattggagagactttttcccatacttgaaatgggttccaaacaagtccttcgaaaacatcatccatagaatgtacactagaagagaagctgttatgaaggccttgatccaagaacacaagaaaagaattgcctccggtgaaaacttgaactcctacattgattacttgttgtctgaagcccaaaccttgaccgataagcaattattgatgtctttgtgggaacctattatcgaatcttctgataccactatggttactactgaatgggctatgtacgaattggctaagaatccaaacatgcaagacagattatacgaagaaatccaatccgtttgcggttccgaaaagattactgaagaaaacttgtcccaattgccatacttgtacgctgttttccaagaaactttgagaaagcactgtccagttcctattatgccattgagatatgttcacgaaaacaccgttttgggtggttatcatgttccagctggtactgaagttgctattaacatctacggttgcaacatggataagaaggtctgggaaaatccagaagaatggaatccagaaagattcttgtccgaaaaagaatccatggacttgtacaaaactatggcttttggtggtggtaaaagagtttgcgctggttctttacaagccatggttatttcttgcattggtatcggtagattggtccaagattttgaatggaagttgaaggatgatgccgaagaagatgttaacactttgggtttgactacccaaaagttgcatccattattggccttgattaacccaagaaagtaactcgagccgcgg

SEQ ID NO: 62 - protein, 512 aa, Lactuca sativa
MDGVIDMQTIPLRTAIAIGGTAVALVVALYFWFLRSYASPSHHSNHLPPVPEVPGVPVLGNLLQLKEKKPYMTFTKWAEMYGPIYSIRTGATSMVVVSSNEIAKEVVVTRFPSISTRKLSYALKVLTEDKSMVAMSDYHDYHKTVKRHILTAVLGPNAQKKFRAHRDTMMENVSNELHAFFEKNPNQEVNLRKIFQSQLFGLAMKQALGKDVESIYVKDLETTMKREEIFEVLVVDPMMGAIEVDWRDFFPYLKWVPNKSFENIIHRMYTRREAVMKALIQEHKKRIASGENLNSYIDYLLSEAQTLTDKQLLMSLWEPIIESSDTTMVTTEWAMYELAKNPNMQDRLYEEIQSVCGSEKITEENLSQLPYLYAVFQETLRKHCPVPIMPLRYVHENTVLGGYHVPAGTEVAINIYGCNMDKKVWENPEEWNPERFLSEKESMDLYKTMAFGGGKRVCAGSLQAMVISCIGIGRLVQDFEWKLKDDAEEDVNTLGLTTQKLHPLLALINPRK

SEQ ID NO: 63 - DNA, 1535 bp, Rubus suavissimus
atggccaccctccttgagcatttccaagctatgccctttgccatccctattgcactggctgctctgtcttggctgttcctcttttacatcaaagtttcattcttttccaacaagagtgctcaggctaagctccctcctgtgccagtggttcctgggctgccggtgattgggaatttactgcaactcaaggagaagaaaccctaccagacttttacaaggtgggctgaggagtatggaccaatctattctatcaggactggtgcttccaccatggtcgttctcaataccacccaagttgcaaaagaggccatggtgaccagatatttatccatctcaaccagaaagctatcaaacgcactaaagattcttactgctgataaatgtatggttgcaataagtgactacaacgattttcacaagatgataaagcgatacatactctcaaatgttcttggacctagtgctcagaagcgtcaccggagcaacagagataccttgagagctaatgtctgcagccgattgcattctcaagtaaagaactctcctcgagaagctgtgaatttcagaagagtttttgagtgggaactctttggaattgcattgaagcaagcctttggaaaggacatagaaaagcccatttatgtggaggaacttggcactacactgtcaagagatgagatctttaaggttctagtgcttgacataatggagggtgcaattgaggttgattggagagatttcttcccttacctgagatggattccgaatacgcgcatggaaacaaaaattcagcgactctatttccgcaggaaagcagtgatgactgccctgatcaacgagcagaagaagcgaattgcttcaggagaggaaatcaactgttatatcgacttcttgcttaaggaagggaagacactgacaatggaccaaataagtatgttgctttgggagacggttattgaaacagcagatactacaatggtaacgacagaatgggctatgtatgaagttgctaaagactcaaagcgtcaggatcgtctctatcaggaaatccaaaaggtttgtggatcggagatggttacagaggaatacttgtcccaactgccgtacctgaatgcagttttccatgaaacgctaaggaagcacagtccggctgcgttagttcctttaagatatgcacatgaagatacccaactaggaggttactacattccagctggaactgagattgctataaacatatacgggtgtaacatggacaagcatcaatgggaaagccctgaggaatggaaaccggagagatttttggacccgaaatttgatcctatggatttgtacaagaccatggcttttggggctggaaagagggtatgtgctggttctcttcaggcaatgttaatagcgtgcccgacgattggtaggctggtgcaggagtttgagtggaagctgagagatggagaagaagaaaatgtagatactgttgggctcaccactcacaaacgctatccaatgcatgcaatcctgaagccaagaagtta

SEQ ID NO: 64 - DNA, 1536 bp, Artificial Sequence
  Codon-optimized KO
atggctaccttgttggaacattttcaagctatgccattcgctattccaattgctttggctgctttgtcttggttgtttttgttctacatcaaggtttctttcttctccaacaaatccgctcaagctaaattgccaccagttccagttgttccaggtttgccagttattggtaatttgttgcaattgaaagaaaagaagccataccaaaccttcactagatgggctgaagaatatggtccaatctactctattagaactggtgcttctactatggttgtcttgaacactactcaagttgccaaagaagctatggttaccagatacttgtctatctctaccagaaagttgtccaacgccttgaaaattttgaccgctgataagtgcatggttgccatttctgattacaacgatttccacaagatgatcaagagatatatcttgtctaacgttttgggtccatctgcccaaaaaagacatagatctaacagagataccttgagagccaacgtttgttctagattgcattcccaagttaagaactctccaagagaagctgtcaactttagaagagttttcgaatgggaattattcggtatcgctttgaaacaagccttcggtaaggatattgaaaagccaatctacgtcgaagaattgggtactactttgtccagagatgaaatcttcaaggttttggtcttggacattatggaaggtgccattgaagttgattggagagattttttcccatacttgcgttggattccaaacaccagaatggaaactaagatccaaagattatactttagaagaaaggccgttatgaccgccttgattaacgaacaaaagaaaagaattgcctccggtgaagaaatcaactgctacatcgatttcttgttgaaagaaggtaagaccttgaccatggaccaaatctctatgttgttgtgggaaaccgttattgaaactgctgataccacaatggttactactgaatgggctatgtacgaagttgctaaggattctaaaagacaagacagattataccaagaaatccaaaaggtctgcggttctgaaatggttacagaagaatacttgtcccaattgccatacttgaatgctgttttccacgaaactttgagaaaacattctccagctgctttggttccattgagatatgctcatgaagatactcaattgggtggttattacattccagccggtactgaaattgccattaacatctacggttgcaacatggacaaacaccaatgggaatctccagaagaatggaagccagaaagatttttggatcctaagtttgacccaatggacttgtacaaaactatggcttttggtgctggtaaaagagtttgcgctggttctttacaagctatgttgattgcttgtccaaccatcggtagattggttcaagaatttgaatggaagttgagagatggtgaagaagaaaacgttgatactgttggtttgaccacccataagagatatccaatgcatgctattttgaagccaagatcttaa

SEQ ID NO: 65 - DNA, 1572 bp, Artificial Sequence
  Codon-optimized KO
aagcttactagtaaaatggcctccatcacccatttcttacaagattttcaagctactccattcgctactgcttttgctgttggtggtgtttctttgttgatattcttcttcttcatccgtggtttccactctactaagaaaaacgaatattacaagttgccaccagttccagttgttccaggtttgccagttgttggtaatttgttgcaattgaaagaaaagaagccatacaagactttcttgagatgggctgaaattcatggtccaatctactctattagaactggtgcttctaccatggttgttgttaactctactcatgttgccaaagaagctatggttaccagattctcttcaatctctaccagaaagttgtccaaggctttggaattattgacctccaacaaatctatggttgccacctctgattacaacgaatttcacaagatggtcaagaagtacatcttggccgaattattgggtgctaatgctcaaaagagacacagaattcatagagacaccttgatcgaaaacgtcttgaacaaattgcatgcccataccaagaattctccattgcaagctgttaacttcagaaagatcttcgaatctgaattattcggtttggctatgaagcaagccttgggttatgatgttgattccttgttcgttgaagaattgggtactaccttgtccagagaagaaatctacaacgttttggtcagtgacatgttgaagggtgctattgaagttgattggagagactttttcccatacttgaaatggatcccaaacaagtccttcgaaatgaagattcaaagattggcctctagaagacaagccgttatgaactctattgtcaaagaacaaaagaagtccattgcctctggtaagggtgaaaactgttacttgaattacttgttgtccgaagctaagactttgaccgaaaagcaaatttccattttggcctgggaaaccattattgaaactgctgatacaactgttgttaccactgaatgggctatgtacgaattggctaaaaacccaaagcaacaagacagattatacaacgaaatccaaaacgtctgcggtactgataagattaccgaagaacatttgtccaagttgccttacttgtctgctgtttttcacgaaaccttgagaaagtattctccatctccattggttccattgagatacgctcatgaagatactcaattgggtggttattatgttccagccggtactgaaattgctgttaatatctacggttgcaacatggacaagaatcaatgggaaactccagaagaatggaagccagaaagatttttggacgaaaagtacgatccaatggacatgtacaagactatgtcttttggttccggtaaaagagtttgcgctggttctttacaagctagtttgattgcttgtacctccatcggtagattggttcaagaatttgaatggagattgaaagacggtgaagttgaaaacgttgataccttgggtttgactacccataagttgtatccaatgcaagctatcttgcaacctagaaactgactcgagccgcgg

SEQ ID NO: 66 - protein, 514 aa, Castanea mollissima
MASITHFLQDFQATPFATAFAVGGVSLLIFFFFIRGFHSTKKNEYYKLPPVPVVPGLPVVGNLLQLKEKKPYKTFLRWAEIHGPIYSIRTGASTMVVVNSTHVAKEAMVTRFSSISTRKLSKALELLTSNKSMVATSDYNEFHKMVKKYILAELLGANAQKRHRIHRDTLIENVLNKLHAHTKNSPLQAVNFRKIFESELFGLAMKQALGYDVDSLFVEELGTTLSREEIYNVLVSDMLKGAIEVDWRDFFPYLKWIPNKSFEMKIQRLASRRQAVMNSIVKEQKKSIASGKGENCYLNYLLSEAKTLTEKQISILAWETIIETADTTVVTTEWAMYELAKNPKQQDRLYNEIQNVCGTDKITEEHLSKLPYLSAVFHETLRKYSPSPLVPLRYAHEDTQLGGYYVPAGTEIAVNIYGCNMDKNQWETPEEWKPERFLDEKYDPMDMYKTMSFGSGKRVCAGSLQASLIACTSIGRLVQEFEWRLKDGEVENVDTLGLTTHKLYPMQAILQPRN

SEQ ID NO: 67 - DNA, 1512 bp, Artificial Sequence
  Codon-optimized KO
atgatttccttgttgttgggttttgttgtctcctccttcttgtttatcttcttcttgaaaaaattgttgttcttcttcagtcgtcacaaaatgtccgaagtttctagattgccatctgttccagttccaggttttccattgattggtaacttgttgcaattgaaagaaaagaagccacacaagactttcaccaagtggtctgaattatatggtccaatctactctatcaagatgggttcctcttctttgatcgtcttgaactctattgaaaccgccaaagaagctatggtcagtagattctcttcaatctctaccagaaagttgtctaacgctttgactgttttgacctgcaacaaatctatggttgctacctctgattacgatgactttcataagttcgtcaagagatgcttgttgaacggtttgttgggtgctaatgctcaagaaagaaaaagacattacagagatgccttgatcgaaaacgttacctctaaattgcatgcccataccagaaatcatccacaagaaccagttaacttcagagccattttcgaacacgaattattcggtgttgctttgaaacaagccttcggtaaagatgtcgaatccatctatgtaaaagaattgggtgtcaccttgtccagagatgaaattttcaaggttttggtccacgacatgatggaaggtgctattgatgttgattggagagatttcttcccatacttgaaatggatcccaaacaactctttcgaagccagaattcaacaaaagcacaagagaagattggctgttatgaacgccttgatccaagacagattgaatcaaaacgattccgaatccgatgatgactgctacttgaatttcttgatgtctgaagctaagaccttgaccatggaacaaattgctattttggtttgggaaaccattatcgaaactgctgataccactttggttactactgaatgggctatgtacgaattggccaaacatcaatctgttcaagatagattattcaaagaaatccaatccgtctgcggtggtgaaaagatcaaagaagaacaattgccaagattgccttacgtcaatggtgtttttcacgaaaccttgagaaagtattctccagctccattggttccaattagatacgctcatgaagatacccaaattggtggttatcatattccagccggttctgaaattgccattaacatctacggttgcaacatggataagaagagatgggaaagacctgaagaatggtggccagaaagatttttggaagatagatacgaatcctccgacttgcataagactatggcttttggtgctggtaaaagagtttgtgctggtgctttacaagctagtttgatggctggtattgctatcggtagattggttcaagaattcgaatggaagttgagagatggtgaagaagaaaacgttgatacttacggtttgacctcccaaaagttgtatccattgatggccattatcaacccaagaagatcttaa

SEQ ID NO: 68 - protein, 506 aa, Thellungiella halophila
MASMISLLLGFVVSSFLFIFFLKKLLFFFSRHKMSEVSRLPSVPVPGFPLIGNLLQLKEKKPHKTFTKWSELYGPIYSIKMGSSSLIVLNSIETAKEAMVSRFSSISTRKLSNALTVLTCNKSMVATSDYDDFHKFVKRCLLNGLLGANAQERKRHYRDALIENVTSKLHAHTRNHPQEPVNFRAIFEHELFGVALKQAFGKDVESIYVKELGVTLSRDEIFKVLVHDMMEGAIDVDWRDFFPYLKWIPNNSFEARIQQKHKRRLAVMNALIQDRLNQNDSESDDDCYLNFLMSEAKTLTMEQIAILVWETIIETADTTLVTTEWAMYELAKHQSVQDRLFKEIQSVCGGEKIKEEQLPRLPYVNGVFHETLRKYSPAPLVPIRYAHEDTQIGGYHIPAGSEIAINIYGCNMDKKRWERPEEWWPERFLEDRYESSDLHKTMAFGAGKRVCAGALQASLMAGIAIGRLVQEFEWKLRDGEEENVDTYGLTSQKLYPLMAIINPRRS

SEQ ID NO: 69 - DNA, 1554 bp, Artificial Sequence
  Codon-optimized KO
aagcttactagtaaaatggacatgatgggtattgaagctgttccatttgctactgctgttgttttgggtggtatttccttggttgttttgatcttcatcagaagattcgtttccaacagaaagagatccgttgaaggtttgccaccagttccagatattccaggtttaccattgattggtaacttgttgcaattgaaagaaaagaagccacataagacctttgctagatgggctgaaacttacggtccaattttctctattagaactggtgcttctaccatgatcgtcttgaattcttctgaagttgccaaagaagctatggtcactagattctcttcaatctctaccagaaagttgtccaacgccttgaagattttgaccttcgataagtgtatggttgccacctctgattacaacgattttcacaaaatggtcaagggtttcatcttgagaaacgttttaggtgctccagcccaaaaaagacatagatgtcatagagataccttgatcgaaaacatctctaagtacttgcatgcccatgttaagacttctccattggaaccagttgtcttgaagaagattttcgaatccgaaattttcggtttggctttgaaacaagccttgggtaaggatatcgaatccatctatgttgaagaattgggtactaccttgtccagagaagaaatttttgccgttttggttgttgatccaatggctggtgctattgaagttgattggagagattttttcccatacttgtcctggattccaaacaagtctatggaaatgaagatccaaagaatggattttagaagaggtgctttgatgaaggccttgattggtgaacaaaagaaaagaatcggttccggtgaagaaaagaactcctacattgatttcttgttgtctgaagctaccactttgaccgaaaagcaaattgctatgttgatctgggaaaccatcatcgaaatttccgatacaactttggttacctctgaatgggctatgtacgaattggctaaagacccaaatagacaagaaatcttgtacagagaaatccacaaggtttgcggttctaacaagttgactgaagaaaacttgtccaagttgccatacttgaactctgttttccacgaaaccttgagaaagtattctccagctccaatggttccagttagatatgctcatgaagatactcaattgggtggttaccatattccagctggttctcaaattgccattaacatctacggttgcaacatgaacaaaaagcaatgggaaaatcctgaagaatggaagccagaaagattcttggacgaaaagtatgacttgatggacttgcataagactatggcttttggtggtggtaaaagagtttgtgctggtgctttacaagcaatgttgattgcttgcacttccatcggtagattcgttcaagaatttgaatggaagttgatgggtggtgaagaagaaaacgttgatactgttgctttgacctcccaaaaattgcatccaatgcaagccattattaaggccagagaatgactcgagccgcgg

SEQ ID NO: 70 - protein, 508 aa, Vitis vinifera
MDMMGIEAVPFATAVVLGGISLVVLIFIRRFVSNRKRSVEGLPPVPDIPGLPLIGNLLQLKEKKPHKTFARWAETYGPIFSIRTGASTMIVLNSSEVAKEAMVTRFSSISTRKLSNALKILTFDKCMVATSDYNDFHKMVKGFILRNVLGAPAQKRHRCHRDTLIENISKYLHAHVKTSPLEPVVLKKIFESEIFGLALKQALGKDIESIYVEELGTTLSREEIFAVLVVDPMAGAIEVDWRDFFPYLSWIPNKSMEMKIQRMDFRRGALMKALIGEQKKRIGSGEEKNSYIDFLLSEATTLTEKQIAMLIWETIIEISDTTLVTSEWAMYELAKDPNRQEILYREIHKVCGSNKLTEENLSKLPYLNSVFHETLRKYSPAPMVPVRYAHEDTQLGGYHIPAGSQIAINIYGCNMNKKQWENPEEWKPERFLDEKYDLMDLHKTMAFGGGKRVCAGALQAMLIACTSIGRFVQEFEWKLMGGEEENVDTVALTSQKLHPMQAIIKARE

SEQ ID NO: 71 - DNA, 1593 bp, Artificial Sequence
  Codon-optimized KO
aagcttaaaatgagtaagtctaatagtatgaattctacatcacacgaaaccctttttcaacaattggtcttgggtttggaccgtatgccattgatggatgttcactggttgatctacgttgctttcggcgcatggttatgttcttatgtgatacatgttttatcatcttcctctacagtaaaagtgccagttgttggatacaggtctgtattcgaacctacatggttgcttagacttagattcgtctgggaaggtggctctatcataggtcaagggtacaataagtttaaagactctattttccaagttaggaaattgggaactgatattgtcattataccacctaactatattgatgaagtgagaaaattgtcacaggacaagactagatcagttgaacctttcattaatgattttgcaggtcaatacacaagaggcatggttttcttgcaatctgacttacaaaaccgtgttatacaacaaagactaactccaaaattggtttccttgaccaaggtcatgaaggaagagttggattatgctttaacaaaagagatgcctgatatgaaaaatgacgaatgggtagaagtagatatcagtagtataatggtgagattgatttccaggatctccgccagagtctttctagggcctgaacactgtcgtaaccaggaatggttgactactacagcagaatattcagaatcacttttcattacagggtttatcttaagagttgtacctcatatcttaagaccattcatcgcccctctattaccttcatacaggactctacttagaaacgtttcaagtggtagaagagtcatcggtgacatcataagatctcagcaaggggatggtaacgaagatatactttcctggatgagagatgctgccacaggagaggaaaagcaaatcgataacattgctcagagaatgttaattctttctttagcatcaatccacactactgcgatgaccatgacacatgccatgtacgatctatgtgcttgccctgagtacattgaaccattaagagatgaagttaaatctgttgttggggcttctggctgggacaagacagcgttaaacagatttcataagttggactccttcctaaaagagtcacaaagattcaacccagtattcttattgacattcaatagaatctaccatcaatctatgaccttatcagatggcactaacattccatctggaacacgtattgctgttccatcacacgcaatgttgcaagattctgcacatgtcccaggtccaaccccacctactgaatttgatggattcagatatagtaagatacgttctgatagtaactacgcacaaaagtacctattctccatgaccgattcttcaaacatggctttcggatacggcaagtatgcttgtccaggtagattttacgcgtctaatgagatgaaactaacattagccattttgttgctacaatttgagttcaaactaccagatggtaaaggtcgtcctagaaatatcactatcgattctgatatgattccagacccaagagctagactttgcgtcagaaaaagatcacttagagatgaatgaccgcgg

SEQ ID NO: 72 - protein, 525 aa, Gibberella fujikuroi
MSKSNSMNSTSHETLFQQLVLGLDRMPLMDVHWLIYVAFGAWLCSYVIHVLSSSSTVKVPVVGYRSVFEPTWLLRLRFVWEGGSIIGQGYNKFKDSIFQVRKLGTDIVIIPPNYIDEVRKLSQDKTRSVEPFINDFAGQYTRGMVFLQSDLQNRVIQQRLTPKLVSLTKVMKEELDYALTKEMPDMKNDEWVEVDISSIMVRLISRISARVFLGPEHCRNQEWLTTTAEYSESLFITGFILRVVPHILRPFIAPLLPSYRTLLRNVSSGRRVIGDIIRSQQGDGNEDILSWMRDAATGEEKQIDNIAQRMLILSLASIHTTAMTMTHAMYDLCACPEYIEPLRDEVKSVVGASGWDKTALNRFHKLDSFLKESQRFNPVFLLTFNRIYHQSMTLSDGTNIPSGTRIAVPSHAMLQDSAHVPGPTPPTEFDGFRYSKIRSDSNYAQKYLFSMTDSSNMAFGYGKYACPGRFYASNEMKLTLAILLLQFEFKLPDGKGRPRNITIDSDMIPDPRARLCVRKRSLRDE

SEQ ID NO: 73 - DNA, 1515 bp, Artificial Sequence
  Codon-optimized KO
aagcttaaaatggaagatcctactgtcttatatgcttgtcttgccattgcagttgcaactttcgttgttagatggtacagagatccattgagatccatcccaacagttggtggttccgatttgcctattctatcttacatcggcgcactaagatggacaagacgtggcagagagatacttcaagagggatatgatggctacagaggatctacattcaaaatcgcgatgttagaccgttggatcgtgatcgcaaatggtcctaaactagctgatgaagtcagacgtagaccagatgaagagttaaactttatggacggattaggagcattcgtccaaactaagtacaccttaggtgaagctattcataacgatccataccatgtcgatatcataagagaaaaactaacaagaggccttccagccgtgcttcctgatgtcattgaagagttgacacttgcggttagacagtacattccaacagaaggtgatgaatgggtgtccgtaaactgttcaaaggccgcaagagatattgttgctagagcttctaatagagtctttgtaggtttgcctgcttgcagaaaccaaggttacttagatttggcaatagactttacattgtctgttgtcaaggatagagccatcatcaatatgtttccagaattgttgaagccaatagttggcagagttgtaggtaacgccaccagaaatgttcgtagagctgttccttttgttgctccattggtggaggaaagacgtagacttatggaagagtacggtgaagactggtctgaaaaacctaatgatatgttacagtggataatggatgaagctgcatccagagatagttcagtgaaggcaatcgcagagagattgttaatggtgaacttcgcggctattcatacctcatcaaacactatcactcatgctttgtaccaccttgccgaaatgcctgaaactttgcaaccacttagagaagagatcgaaccattagtcaaagaggagggctggaccaaggctgctatgggaaaaatgtggtggttagattcatttctaagagaatctcaaagatacaatggcattaacatcgtatctttaactagaatggctgacaaagatattacattgagtgatggcacatttttgccaaaaggtactctagtggccgttccagcgtattctactcatagagatgatgctgtctacgctgatgccttagtattcgatcctttcagattctcacgtatgagagcgagagaaggtgaaggtacaaagcaccagttcgttaatacttcagtcgagtacgttccatttggtcacggaaagcatgcttgtccaggaagattcttcgccgcaaacgaattgaaagcaatgttggcttacattgttctaaactatgatgtaaagttgcctggtgacggtaaacgtccattgaacatgtattggggtccaacagttttgcctgcaccagcaggccaagtattgttcagaaagagacaagttagtctataaccgcgg

SEQ ID NO: 74 - protein, 499 aa, Trametes versicolor
MEDPTVLYACLAIAVATFVVRWYRDPLRSIPTVGGSDLPILSYIGALRWTRRGREILQEGYDGYRGSTFKIAMLDRWIVIANGPKLADEVRRRPDEELNFMDGLGAFVQTKYTLGEAIHNDPYHVDIIREKLTRGLPAVLPDVIEELTLAVRQYIPTEGDEWVSVNCSKAARDIVARASNRVFVGLPACRNQGYLDLAIDFTLSVVKDRAIINMFPELLKPIVGRVVGNATRNVRRAVPFVAPLVEERRRLMEEYGEDWSEKPNDMLQWIMDEAASRDSSVKAIAERLLMVNFAAIHTSSNTITHALYHLAEMPETLQPLREEIEPLVKEEGWTKAAMGKMWWLDSFLRESQRYNGINIVSLTRMADKDITLSDGTFLPKGTLVAVPAYSTHRDDAVYADALVFDPFRFSRMRAREGEGTKHQFVNTSVEYVPFGHGKHACPGRFFAANELKAMLAYIVLNYDVKLPGDGKRPLNMYWGPTVLPAPAGQVLFRKRQVSL

SEQ ID NO: 75 - DNA, 1530 bp, Artificial Sequence
  Codon-optimized KO
atggcatttttctctatgatttcaattttgttgggatttgttatttcttctttcatcttcatctttttcttcaaaaagttacttagttttagtaggaaaaacatgtcagaagtttctactttgccaagtgttccagtagtgcctggttttccagttattgggaatttgttgcaactaaaggagaaaaagcctcataaaactttcactagatggtcagagatatatggacctatctactctataaagatgggttcttcatctcttattgtattgaacagtacagaaactgctaaggaagcaatggtcactagattttcatcaatatctaccagaaaattgtcaaacgccctaacagttctaacctgcgataagtctatggtcgccacttctgattatgatgacttccacaaattagttaagagatgtttgctaaatggacttcttggtgctaatgctcaaaagagaaaaagacactacagagatgctttgattgaaaatgtgagttccaagctacatgcacacgctagagatcatccacaagagccagttaactttagagcaattttcgaacacgaattgtttggtgtagcattaaagcaagccttcggtaaagacgtagaatccatatacgtcaaggagttaggcgtaacattatcaaaagatgaaatctttaaggtgcttgtacatgatatgatggagggtgcaattgatgtagattggagagatttcttcccatatttgaaatggatccctaataagtcttttgaagctaggatacaacaaaagcacaagagaagactagctgttatgaacgcacttatacaggacagattgaagcaaaatgggtctgaatcagatgatgattgttaccttaacttcttaatgtctgaggctaaaacattgactaaggaacagatcgcaatccttgtctgggaaacaatcattgaaacagcagatactaccttagtcacaactgaatgggccatatacgagctagccaaacatccatctgtgcaagataggttgtgtaaggagatccagaacgtgtgtggtggagagaaattcaaggaagagcagttgtcacaagttccttaccttaacggcgttttccatgaaaccttgagaaaatactcacctgcaccattagttcctattagatacgcccacgaagatacacaaatcggtggctaccatgttccagctgggtccgaaattgctataaacatctacgggtgcaacatggacaaaaagagatgggaaagaccagaagattggtggccagaaagattcttagatgatggcaaatatgaaacatctgatttgcataaaacaatggctttcggagctggcaaaagagtgtgtgccggtgctctacaagcctccctaatggctggtatcgctattggtagattggtccaagagttcgaatggaaacttagagatggtgaagaggaaaatgtcgatacttatgggttaacatctcaaaagttatacccactaatggcaatcatcaatcctagaagatcctaa

SEQ ID NO: 76 - protein, 509 aa, Arabidopsis thaliana
MAFFSMISILLGFVISSFIFIFFFKKLLSFSRKNMSEVSTLPSVPVVPGFPVIGNLLQLKEKKPHKTFTRWSEIYGPIYSIKMGSSSLIVLNSTETAKEAMVTRFSSISTRKLSNALTVLTCDKSMVATSDYDDFHKLVKRCLLNGLLGANAQKRKRHYRDALIENVSSKLHAHARDHPQEPVNFRAIFEHELFGVALKQAFGKDVESIYVKELGVTLSKDEIFKVLVHDMMEGAIDVDWRDFFPYLKWIPNKSFEARIQQKHKRRLAVMNALIQDRLKQNGSESDDDCYLNFLMSEAKTLTKEQIAILVWETIIETADTTLVTTEWAIYELAKHPSVQDRLCKEIQNVCGGEKFKEEQLSQVPYLNGVFHETLRKYSPAPLVPIRYAHEDTQIGGYHVPAGSEIAINIYGCNMDKKRWERPEDWWPERFLDDGKYETSDLHKTMAFGAGKRVCAGALQASLMAGIAIGRLVQEFEWKLRDGEEENVDTYGLTSQKLYPLMAIINPRRS

SEQ ID NO: 77 - DNA, 2133 bp, Artificial Sequence
  Codon-optimized CPR
atgcaatcagattcagtcaaagtctctccatttgatttggtttccgctgctatgaatggcaaggcaatggaaaagttgaacgctagtgaatctgaagatccaacaacattgcctgcactaaagatgctagttgaaaatagagaattgttgacactgttcacaacttccttcgcagttcttattgggtgtcttgtatttctaatgtggagacgttcatcctctaaaaagctggtacaagatccagttccacaagttatcgttgtaaagaagaaagagaaggagtcagaggttgatgacgggaaaaagaaagtttctattttctacggcacacaaacaggaactgccgaaggttttgctaaagcattagtcgaggaagcaaaagtgagatatgaaaagacctctttcaaggttatcgatctagatgactacgctgcagatgatgatgaatatgaggaaaaactgaaaaaggaatccttagccttcttcttcttggccacatacggtgatggtgaacctactgataatgctgctaacttctacaagtggttcacagaaggcgacgataaaggtgaatggctgaaaaagttacaatacggagtatttggtttaggtaacagacaatatgaacatttcaacaagatcgctattgtagttgatgataaacttactgaaatgggagccaaaagattagtaccagtaggattaggggatgatgatcagtgtatagaagatgacttcaccgcctggaaggaattggtatggccagaattggatcaacttttaagggacgaagatgatacttctgtgactaccccatacactgcagccgtattggagtacagagtggtttaccatgataaaccagcagactcatatgctgaagatcaaacccatacaaacggtcatgttgttcatgatgcacagcatccttcaagatctaatgtggctttcaaaaaggaactacacacctctcaatcagataggtcttgtactcacttagaattcgatatttctcacacaggactgtcttacgaaactggcgatcacgttggcgtttattccgagaacttgtccgaagttgtcgatgaagcactaaaactgttagggttatcaccagacacatacttctcagtccatgctgataaggaggatgggacacctatcggtggtgcttcactaccaccaccttttcctccttgcacattgagagacgctctaaccagatacgcagatgtcttatcctcacctaaaaaggtagctttgctggcattggctgctcatgctagtgatcctagtgaagccgataggttaaagttcctggcttcaccagccggaaaagatgaatatgcacaatggatcgtcgccaaccaacgttctttgctagaagtgatgcaaagttttccatctgccaagcctccattaggtgtgttcttcgcagcagtagctccacgtttacaaccaagatactactctatcagttcatctcctaagatgtctcctaacagaatacatgttacatgtgctttggtgtacgagactactccagcaggcagaattcacagaggattgtgttcaacctggatgaaaaatgctgtccctttaacagagtcacctgattgctctcaagcatccattttcgttagaacatcaaatttcagacttccagtggatccaaaagttccagtcattatgataggaccaggcactggtcttgccccattcaggggctttcttcaagagagattggccttgaaggaatctggtacagaattgggttcttctatctttttctttggttgccgtaatagaaaagttgactttatctacgaggacgagcttaacaattttgttgagacaggagcattgtcagaattgatcgtcgcattttcaagagaagggactgccaaagagtacgttcagcacaagatgagtcaaaaagcctccgatatatggaaacttctaagtgaaggtgcctatctttatgtctgtggcgatgcaaagggcatggccaaggatgtccatagaactctgcatacaattgttcaggaacaagggagtctggattcttccaaggctgaattgtacgtcaaaaacttacagatgtctggaagatacttaagagatgtttggtaa

SEQ ID NO: 78 - protein, 710 aa, Stevia rebaudiana
MQSDSVKVSPFDLVSAAMNGKAMEKLNASESEDPTTLPALKMLVENRELLTLFTTSFAVLIGCLVFLMWRRSSSKKLVQDPVPQVIVVKKKEKESEVDDGKKKVSIFYGTQTGTAEGFAKALVEEAKVRYEKTSFKVIDLDDYAADDDEYEEKLKKESLAFFFLATYGDGEPTDNAANFYKWFTEGDDKGEWLKKLQYGVFGLGNRQYEHFNKIAIVVDDKLTEMGAKRLVPVGLGDDDQCIEDDFTAWKELVWPELDQLLRDEDDTSVTTPYTAAVLEYRVVYHDKPADSYAEDQTHTNGHVVHDAQHPSRSNVAFKKELHTSQSDRSCTHLEFDISHTGLSYETGDHVGVYSENLSEVVDEALKLLGLSPDTYFSVHADKEDGTPIGGASLPPPFPPCTLRDALTRYADVLSSPKKVALLALAAHASDPSEADRLKFLASPAGKDEYAQWIVANQRSLLEVMQSFPSAKPPLGVFFAAVAPRLQPRYYSISSSPKMSPNRIHVTCALVYETTPAGRIHRGLCSTWMKNAVPLTESPDCSQASIFVRTSNFRLPVDPKVPVIMIGPGTGLAPFRGFLQERLALKESGTELGSSIFFFGCRNRKVDFIYEDELNNFVETGALSELIVAFSREGTAKEYVQHKMSQKASDIWKLLSEGAYLYVCGDAKGMAKDVHRTLHTIVQEQGSLDSSKAELYVKNLQMSGRYLRDVW

SEQ ID NO: 79 - DNA, 2106 bp, Siraitia grosvenorii
atgaaggtcagtccattcgaattcatgtccgctattatcaagggtagaatggacccatctaactcctcatttgaatctactggtgaagttgcctccgttatctttgaaaacagagaattggttgccatcttgaccacttctattgctgttatgattggttgcttcgttgtcttgatgtggagaagagctggttctagaaaggttaagaatgtcgaattgccaaagccattgattgtccatgaaccagaacctgaagttgaagatggtaagaagaaggtttccatcttcttcggtactcaaactggtactgctgaaggttttgctaaggctttggctgatgaagctaaagctagatacgaaaaggctaccttcagagttgttgatttggatgattatgctgccgatgatgaccaatacgaagaaaaattgaagaacgaatccttcgccgttttcttgttggctacttatggtgatggtgaacctactgataatgctgctagattttacaagtggttcgccgaaggtaaagaaagaggtgaatggttgcaaaacttgcactatgctgtttttggtttgggtaacagacaatacgaacacttcaacaagattgctaaggttgccgacgaattattggaagctcaaggtggtaatagattggttaaggttggtttaggtgatgacgatcaatgcatcgaagatgatttttctgcttggagagaatctttgtggccagaattggatatgttgttgagagatgaagatgatgctactactgttactactccatatactgctgctgtcttggaatacagagttgtctttcatgattctgctgatgttgctgctgaagataagtcttggattaacgctaatggtcatgctgttcatgatgctcaacatccattcagatctaacgttgtcgtcagaaaagaattgcatacttctgcctctgatagatcctgttctcatttggaattcaacatttccggttccgctttgaattacgaaactggtgatcatgttggtgtctactgtgaaaacttgactgaaactgttgatgaagccttgaacttgttgggtttgtctccagaaacttacttctctatctacaccgataacgaagatggtactccattgggtggttcttcattgccaccaccatttccatcatgtactttgagaactgctttgaccagatacgctgatttgttgaactctccaaaaaagtctgctttgttggctttagctgctcatgcttctaatccagttgaagctgatagattgagatacttggcttctccagctggtaaagatgaatatgcccaatctgttatcggttcccaaaagtctttgttggaagttatggctgaattcccatctgctaaaccaccattaggtgttttttttgctgctgttgctccaagattgcaacctagattctactccatttcatcctctccaagaatggctccatctagaatccatgttacttgtgctttggtttacgataagatgccaactggtagaattcataagggtgtttgttctacctggatgaagaattctgttccaatggaaaagtcccatgaatgttcttgggctccaattttcgttagacaatccaattttaagttgccagccgaatccaaggttccaattatcatggttggtccaggtactggtttggctccttttagaggttttttacaagaaagattggccttgaaagaatccggtgttgaattgggtccatccattttgtttttcggttgcagaaacagaagaatggattacatctacgaagatgaattgaacaacttcgttgaaaccggtgctttgtccgaattggttattgctttttctagagaaggtcctaccaaagaatacgtccaacataagatggctgaaaaggcttctgatatctggaacttgatttctgaaggtgcttacttgtacgtttgtggtgatgctaaaggtatggctaaggatgttcatagaaccttgcataccatcatgcaagaacaaggttctttggattcttccaaagctgaatccatggtcaagaacttgcaaatgaatggtagatacttaagagatgtttggtaa

SEQ ID NO: 80 - protein, 701 aa, Siraitia grosvenorii
MKVSPFEFMSAIIKGRMDPSNSSFESTGEVASVIFENRELVAILTTSIAVMIGCFVVLMWRRAGSRKVKNVELPKPLIVHEPEPEVEDGKKKVSIFFGTQTGTAEGFAKALADEAKARYEKATFRVVDLDDYAADDDQYEEKLKNESFAVFLLATYGDGEPTDNAARFYKWFAEGKERGEWLQNLHYAVFGLGNRQYEHFNKIAKVADELLEAQGGNRLVKVGLGDDDQCIEDDFSAWRESLWPELDMLLRDEDDATTVTTPYTAAVLEYRVVFHDSADVAAEDKSWINANGHAVHDAQHPFRSNVVVRKELHTSASDRSCSHLEFNISGSALNYETGDHVGVYCENLTETVDEALNLLGLSPETYFSIYTDNEDGTPLGGSSLPPPFPSCTLRTALTRYADLLNSPKKSALLALAAHASNPVEADRLRYLASPAGKDEYAQSVIGSQKSLLEVMAEFPSAKPPLGVFFAAVAPRLQPRFYSISSSPRMAPSRIHVTCALVYDKMPTGRIHKGVCSTWMKNSVPMEKSHECSWAPIFVRQSNFKLPAESKVPIIMVGPGTGLAPFRGFLQERLALKESGVELGPSILFFGCRNRRMDYIYEDELNNFVETGALSELVIAFSREGPTKEYVQHKMAEKASDIWNLISEGAYLYVCGDAKGMAKDVHRTLHTIMQEQGSLDSSKAESMVKNLQMNGRYLRDVW

SEQ ID NO: 81 - DNA, 2142 bp, Artificial Sequence
  Codon-optimized CPR
atggcagaattagatacacttgatatagtagtattaggtgttatctttttgggtactgtggcatactttactaagggtaaattgtggggtgttaccaaggatccatacgctaacggattcgctgcaggtggtgcttccaagcctggcagaactagaaacatcgtcgaagctatggaggaatcaggtaaaaactgtgttgttttctacggcagtcaaacaggtacagcggaggattacgcatcaagacttgcaaaggaaggaaagtccagattcggtttgaacactatgatcgccgatctagaagattatgacttcgataacttagacactgttccatctgataacatcgttatgtttgtattggctacttacggtgaaggcgaaccaacagataacgccgtggatttctatgagttcattactggcgaagatgcctctttcaatgagggcaacgatcctccactaggtaacttgaattacgttgcgttcggtctgggcaacaatacctacgaacactacaactcaatggtcaggaacgttaacaaggctctagaaaagttaggagctcatagaattggagaagcaggtgagggtgacgacggagctggaactatggaagaggactttttagcttggaaagatccaatgtgggaagccttggctaaaaagatgggcttggaggaaagagaagctgtatatgaacctattttcgctatcaatgagagagatgatttgacccctgaagcgaatgaggtatacttgggagaacctaataagctacacttggaaggtacagcgaaaggtccattcaactcccacaacccatatatcgcaccaattgcagaatcatacgaacttttctcagctaaggatagaaattgtctgcatatggaaattgatatttctggtagtaatctaaagtatgaaacaggcgaccatatcgcgatctggcctaccaacccaggtgaagaggtcaacaaatttcttgacattctagatctgtctggtaagcaacattccgtcgtaacagtgaaagccttagaacctacagccaaagttccttttccaaatccaactacctacgatgctatattgagataccatctggaaatatgcgctccagtttctagacagtttgtctcaactttagcagcattcgcccctaatgatgatatcaaagctgagatgaaccgtttgggatcagacaaagattacttccacgaaaagacaggaccacattactacaatatcgctagatttttggcctcagtctctaaaggtgaaaaatggacaaagataccattttctgctttcatagaaggccttacaaaactacaaccaagatactattctatctcttcctctagtttagttcagcctaaaaagattagtattactgctgttgtcgaatctcagcaaattccaggtagagatgacccattcagaggtgtagcgactaactacttgttcgctttgaagcagaaacaaaacggtgatccaaatccagctccttttggccaatcatacgagttgacaggaccaaggaataagtatgatggtatacatgttccagtccatgtaagacattctaactttaagctaccatctgatccaggcaaacctattatcatgatcggtccaggtaccggtgttgccccttttagaggcttcgtccaagagagggcaaaacaagccagagatggtgtagaagttggtaaaacactgctgttctttggatgtagaaagagtacagaagatttcatgtatcaaaaagagtggcaagagtacaaggaagctcttggcgacaaattcgaaatgattacagctttttcaagagaaggatctaaaaaggtttatgttcaacacagactgaaggaaagatcaaaggaagtttctgatcttctatcccaaaaagcatacttctacgtttgcggagacgccgcacatatggcacgtgaagtgaacactgtgttagcacagatcatagcagaaggccgtggtgtatcagaagccaagggtgaggaaattgtcaaaaacatgagatcagcaaatcaataccaagtgtgttctgatttcgtaactttacactgtaaagagacaacatacgcgaattcagaattgcaagaggatgtctggagttaa

SEQ ID NO: 82 - protein, 713 aa, Gibberella fujikuroi
MAELDTLDIVVLGVIFLGTVAYFTKGKLWGVTKDPYANGFAAGGASKPGRTRNIVEAMEESGKNCVVFYGSQTGTAEDYASRLAKEGKSRFGLNTMIADLEDYDFDNLDTVPSDNIVMFVLATYGEGEPTDNAVDFYEFITGEDASFNEGNDPPLGNLNYVAFGLGNNTYEHYNSMVRNVNKALEKLGAHRIGEAGEGDDGAGTMEEDFLAWKDPMWEALAKKMGLEEREAVYEPIFAINERDDLTPEANEVYLGEPNKLHLEGTAKGPFNSHNPYIAPIAESYELFSAKDRNCLHMEIDISGSNLKYETGDHIAIWPTNPGEEVNKFLDILDLSGKQHSVVTVKALEPTAKVPFPNPTTYDAILRYHLEICAPVSRQFVSTLAAFAPNDDIKAEMNRLGSDKDYFHEKTGPHYYNIARFLASVSKGEKWTKIPFSAFIEGLTKLQPRYYSISSSSLVQPKKISITAVVESQQIPGRDDPFRGVATNYLFALKQKQNGDPNPAPFGQSYELTGPRNKYDGIHVPVHVRHSNFKLPSDPGKPIIMIGPGTGVAPFRGFVQERAKQARDGVEVGKTLLFFGCRKSTEDFMYQKEWQEYKEALGDKFEMITAFSREGSKKVYVQHRLKERSKEVSDLLSQKAYFYVCGDAAHMAREVNTVLAQIIAEGRGVSEAKGEEIVKNMRSANQYQVCSDFVTLHCKETTYANSELQEDVWS

SEQ ID NO: 83 - DNA, 2130 bp, Stevia rebaudiana
atgcaatcggaatccgttgaagcatcgacgattgatttgatgactgctgttttgaaggacacagtgatcgatacagcgaacgcatctgataacggagactcaaagatgccgccggcgttggcgatgatgttcgaaattcgtgatctgttgctgattttgactacgtcagttgctgttttggtcggatgtttcgttgttttggtgtggaagagatcgtccgggaagaagtccggcaaggaattggagccgccgaagatcgttgtgccgaagaggcggctggagcaggaggttgatgatggtaagaagaaggttacgattttcttcggaacacaaactggaacggctgaaggtttcgctaaggcacttttcgaagaagcgaaagcgcgatatgaaaaggcagcgtttaaagtgattgatttggatgattatgctgctgatttggatgagtatgcagagaagctgaagaaggaaacatatgctttcttcttcttggctacatatggagatggtgagccaactgataatgctgccaaattttataaatggtttactgagggagacgagaaaggcgtttggcttcaaaaacttcaatatggagtatttggtcttggcaacagacaatatgaacatttcaacaagattggaatagtggttgatgatggtctcaccgagcagggtgcaaaacgcattgttcccgttggtcttggagacgacgatcaatcaattgaagacgatttttcggcatggaaagagttagtgtggcccgaattggatctattgcttcgcgatgaagatgacaaagctgctgcaactccttacacagctgcaatccctgaataccgcgtcgtatttcatgacaaacccgatgcgttttctgatgatcatactcaaaccaatggtcatgctgttcatgatgctcaacatccatgcagatccaatgtggctgttaaaaaagagcttcatactcctgaatccgatcgttcatgcacacatcttgaatttgacatttctcacactggattatcttatgaaactggggatcatgttggtgtatactgtgaaaacctaattgaagtagtggaagaagctgggaaattgttaggattatcaacagatacttatttctcgttacatattgataacgaagatggttcaccacttggtggaccttcattacaacctccttttcctccttgtactttaagaaaagcattgactaattatgcagatctgttaagctctcccaaaaagtcaactttgcttgctctagctgctcatgcttccgatcccactgaagctgatcgtttaagatttcttgcatctcgcgagggcaaggatgaatatgctgaatgggttgttgcaaaccaaagaagtcttcttgaagtcatggaagctttcccgtcagctagaccgccacttggtgttttctttgcagcggttgcaccgcgtttacagcctcgttactactctatttcttcctccccaaagatggaaccaaacaggattcatgttacttgcgcgttggtttatgaaaaaactcccgcaggtcgtatccacaaaggaatctgctcaacctggatgaagaacgctgtacctttgaccgaaagtcaagattgcagttgggcaccgatttttgttagaacatcaaacttcagacttccaattgacccgaaagtcccggttatcatgattggtcctggaaccgggttggctccatttaggggttttcttcaagaaagattggctcttaaagaatccggaaccgaactcgggtcatctattttattcttcggttgtagaaaccgcaaagtggattacatatatgagaatgaactcaacaactttgttgaaaatggtgcgctttctgagcttgatgttgctttctcccgcgatggcccgacgaaagaatacgtgcaacataaaatgacccaaaaggcttctgaaatatggaatatgctttctgagggagcatatttatatgtatgtggtgatgctaaaggcatggctaaagatgtacaccgtacacttcacaccattgtgcaagaacagggaagtttggactcgtctaaagcggagttgtatgtgaagaatctacaaatgtcaggaagatacctccgtgatgtttggtaa

SEQ ID NO: 84 - protein, 709 aa, Stevia rebaudiana
MQSESVEASTIDLMTAVLKDTVIDTANASDNGDSKMPPALAMMFEIRDLLLILTTSVAVLVGCFVVLVWKRSSGKKSGKELEPPKIVVPKRRLEQEVDDGKKKVTIFFGTQTGTAEGFAKALFEEAKARYEKAAFKVIDLDDYAADLDEYAEKLKKETYAFFFLATYGDGEPTDNAAKFYKWFTEGDEKGVWLQKLQYGVFGLGNRQYEHFNKIGIVVDDGLTEQGAKRIVPVGLGDDDQSIEDDFSAWKELVWPELDLLLRDEDDKAAATPYTAAIPEYRVVFHDKPDAFSDDHTQTNGHAVHDAQHPCRSNVAVKKELHTPESDRSCTHLEFDISHTGLSYETGDHVGVYCENLIEVVEEAGKLLGLSTDTYFSLHIDNEDGSPLGGPSLQPPFPPCTLRKALTNYADLLSSPKKSTLLALAAHASDPTEADRLRFLASREGKDEYAEWVVANQRSLLEVMEAFPSARPPLGVFFAAVAPRLQPRYYSISSSPKMEPNRIHVTCALVYEKTPAGRIHKGICSTWMKNAVPLTESQDCSWAPIFVRTSNFRLPIDPKVPVIMIGPGTGLAPFRGFLQERLALKESGTELGSSILFFGCRNRKVDYIYENELNNFVENGALSELDVAFSRDGPTKEYVQHKMTQKASEIWNMLSEGAYLYVCGDAKGMAKDVHRTLHTIVQEQGSLDSSKAELYVKNLQMSGRYLRDVW

SEQ ID NO: 85 - DNA, 2124 bp, Artificial Sequence
  Codon-optimized CPR
atgcaatctaactccgtgaagatttcgccgcttgatctggtaactgcgctgtttagcggcaaggttttggacacatcgaacgcatcggaatcgggagaatctgctatgctgccgactatagcgatgattatggagaatcgtgagctgttgatgatactcacaacgtcggttgctgtattgatcggatgcgttgtcgttttggtgtggcggagatcgtctacgaagaagtcggcgttggagccaccggtgattgtggttccgaagagagtgcaagaggaggaagttgatgatggtaagaagaaagttacggttttcttcggcacccaaactggaacagctgaaggcttcgctaaggcacttgttgaggaagctaaagctcgatatgaaaaggctgtctttaaagtaattgatttggatgattatgctgctgatgacgatgagtatgaggagaaactaaagaaagaatctttggcctttttctttttggctacgtatggagatggtgagccaacagataatgctgccagattttataaatggtttactgagggagatgcgaaaggagaatggcttaataagcttcaatatggagtatttggtttgggtaacagacaatatgaacattttaacaagatcgcaaaagtggttgatgatggtcttgtagaacagggtgcaaagcgtcttgttcctgttggacttggagatgatgatcaatgtattgaagatgacttcaccgcatggaaagagttagtatggccggagttggatcaattacttcgtgatgaggatgacacaactgttgctactccatacacagctgctgttgcagaatatcgcgttgtttttcatgaaaaaccagacgcgctttctgaagattatagttatacaaatggccatgctgttcatgatgctcaacatccatgcagatccaacgtggctgtcaaaaaggaacttcatagtcctgaatctgaccggtcttgcactcatcttgaatttgacatctcgaacaccggactatcatatgaaactggggaccatgttggagtttactgtgaaaacttgagtgaagttgtgaatgatgctgaaagattagtaggattaccaccagacacttactcctccatccacactgatagtgaagacgggtcgccacttggcggagcctcattgccgcctcctttcccgccatgcactttaaggaaagcattgacgtgttatgctgatgttttgagttctcccaagaagtcggctttgcttgcactagctgctcatgccaccgatcccagtgaagctgatagattgaaatttcttgcatcccccgccggaaaggatgaatattctcaatggatagttgcaagccaaagaagtctccttgaagtcatggaagcattcccgtcagctaagccttcacttggtgttttctttgcatctgttgccccgcgcttacaaccaagatactactctatttcttcctcacccaagatggcaccggataggattcatgttacatgtgcattagtctatgagaaaacacctgcaggccgcatccacaaaggagtttgttcaacttggatgaagaacgcagtgcctatgaccgagagtcaagattgcagttgggccccaatatacgtccgaacatccaatttcagactaccatctgaccctaaggtcccggttatcatgattggacctggcactggtttggctccttttagaggtttccttcaagagcggttagctttaaaggaagccggaactgacctcggtttatccattttattcttcggatgtaggaatcgcaaagtggatttcatatatgaaaacgagcttaacaactttgtggagactggtgctctttctgagcttattgttgctttctcccgtgaaggcccgactaaggaatatgtgcaacacaagatgagtgagaaggcttcggatatctggaacttgctttctgaaggagcatatttatacgtatgtggtgatgccaaaggcatggccaaagatgtacatcgaaccctccacacaattgtgcaagaacagggatctcttgactcgtcaaaggcagaactctacgtgaagaatctacaaatgtcaggaagatacctccgtgacgtttggtaa

SEQ ID NO: 86 - protein, 707 aa, Stevia rebaudiana
MQSNSVKISPLDLVTALFSGKVLDTSNASESGESAMLPTIAMIMENRELLMILTTSVAVLIGCVVVLVWRRSSTKKSALEPPVIVVPKRVQEEEVDDGKKKVTVFFGTQTGTAEGFAKALVEEAKARYEKAVFKVIDLDDYAADDDEYEEKLKKESLAFFFLATYGDGEPTDNAARFYKWFTEGDAKGEWLNKLQYGVFGLGNRQYEHFNKIAKVVDDGLVEQGAKRLVPVGLGDDDQCIEDDFTAWKELVWPELDQLLRDEDDTTVATPYTAAVAEYRVVFHEKPDALSEDYSYTNGHAVHDAQHPCRSNVAVKKELHSPESDRSCTHLEFDISNTGLSYETGDHVGVYCENLSEVVNDAERLVGLPPDTYSSIHTDSEDGSPLGGASLPPPFPPCTLRKALTCYADVLSSPKKSALLALAAHATDPSEADRLKFLASPAGKDEYSQWIVASQRSLLEVMEAFPSAKPSLGVFFASVAPRLQPRYYSISSSPKMAPDRIHVTCALVYEKTPAGRIHKGVCSTWMKNAVPMTESQDCSWAPIYVRTSNFRLPSDPKVPVIMIGPGTGLAPFRGFLQERLALKEAGTDLGLSILFFGCRNRKVDFIYENELNNFVETGALSELIVAFSREGPTKEYVQHKMSEKASDIWNLLSEGAYLYVCGDAKGMAKDVHRTLHTIVQEQGSLDSSKAELYVKNLQMSGRYLRDVW

SEQ ID NO: 87 - DNA, 2070 bp, Artificial Sequence
  Codon-optimized CPR
atgtcctccaactccgatttggtcagaagattggaatctgttttgggtgtttctttcggtggttctgttactgattccgttgttgttattgctaccacctctattgctttggttatcggtgttttggttttgttgtggagaagatcctctgacagatctagagaagttaagcaattggctgttccaaagccagttactatcgttgaagaagaagatgaattcgaagttgcttctggtaagaccagagtttctattttctacggtactcaaactggtactgctgaaggttttgctaaggctttggctgaagaaatcaaagccagatacgaaaaagctgccgttaaggttattgatttggatgattacacagccgaagatgacaaatacggtgaaaagttgaagaaagaaactatggccttcttcatgttggctacttatggtgatggtgaacctactgataatgctgctagattttacaagtggttcaccgaaggtactgatagaggtgtttggttggaacatttgagatacggtgtattcggtttgggtaacagacaatacgaacacttcaacaagattgccaaggttgttgatgatttgttggttgaacaaggtgccaagagattggttactgttggtttgggtgatgatgatcaatgcatcgaagatgatttctccgcttggaaagaagccttgtggccagaattggatcaattattgcaagatgataccaacaccgtttctactccatacactgctgttattccagaatacagagttgttatccacgatccatctgttacctcttatgaagatccatactctaacatggctaacggtaatgcctcttacgatattcatcatccatgtagagctaacgttgccgtccaaaaagaattgcataagccagaatctgacagaagttgcatccatttggaattcgatattttcgctactggtttgacttacgaaaccggtgatcatgttggtgtttacgctgataattgtgatgatactgtagaagaagccgctaagttgttgggtcaaccattggatttgttgttctccattcataccgataacaacgacggtacttctttgggttcttctttgccaccaccatttccaggtccatgtactttgagaactgctttggctagatatgccgatttgttgaatccaccaaaaaaggctgctttgattgctttagctgctcatgctgatgaaccatctgaagctgaaagattgaagttcttgtcatctccacaaggtaaggacgaatattctaaatgggttgtcggttcccaaagatccttggttgaagttatggctgaatttccatctgctaaaccaccattgggtgtattttttgctgctgttgttcctagattgcaacctagatattactccatctcttccagtccaagatttgctccacatagagttcatgttacttgcgctttggtttatggtccaactccaactggtagaattcacagaggtgtatgttcattctggatgaagaatgttgtcccattggaaaagtctcaaaactgttcttgggccccaattttcatcagacaatctaatttcaagttgccagccgatcattctgttccaatagttatggttggtccaggtactggtttagctccttttagaggtttcttacaagaaagattggccttgaaagaagaaggtgctcaagttggtcctgctttgttgttttttggttgcagaaacagacaaatggacttcatctacgaagtcgaattgaacaactttgtcgaacaaggtgctttgtccgaattgatcgttgctttttcaagagaaggtccatccaaagaatacgtccaacataagatggttgaaaaggcagcttacatgtggaacttgatttctcaaggtggttacttctacgtttgtggtgatgctaaaggtatggctagagatgttcatagaacattgcataccatcgtccaacaagaagaaaaggttgattctaccaaggccgaatccatcgttaagaaattgcaaatggacggtagatacttgagagatgtttggtga

SEQ ID NO: 88 - protein, 689 aa, Rubus suavissimus
MSSNSDLVRRLESVLGVSFGGSVTDSVVVIATTSIALVIGVLVLLWRRSSDRSREVKQLAVPKPVTIVEEEDEFEVASGKTRVSIFYGTQTGTAEGFAKALAEEIKARYEKAAVKVIDLDDYTAEDDKYGEKLKKETMAFFMLATYGDGEPTDNAARFYKWFTEGTDRGVWLEHLRYGVFGLGNRQYEHFNKIAKVVDDLLVEQGAKRLVTVGLGDDDQCIEDDFSAWKEALWPELDQLLQDDTNTVSTPYTAVIPEYRVVIHDPSVTSYEDPYSNMANGNASYDIHHPCRANVAVQKELHKPESDRSCIHLEFDIFATGLTYETGDHVGVYADNCDDTVEEAAKLLGQPLDLLFSIHTDNNDGTSLGSSLPPPFPGPCTLRTALARYADLLNPPKKAALIALAAHADEPSEAERLKFLSSPQGKDEYSKWVVGSQRSLVEVMAEFPSAKPPLGVFFAAVVPRLQPRYYSISSSPRFAPHRVHVTCALVYGPTPTGRIHRGVCSFWMKNVVPLEKSQNCSWAPIFIRQSNFKLPADHSVPIVMVGPGTGLAPFRGFLQERLALKEEGAQVGPALLFFGCRNRQMDFIYEVELNNFVEQGALSELIVAFSREGPSKEYVQHKMVEKAAYMWNLISQGGYFYVCGDAKGMARDVHRTLHTIVQQEEKVDSTKAESIVKKLQMDGRYLRDVW

SEQ ID NO: 89 - DNA, 2079 bp, Artificial Sequence
  Codon-optimized CPR
atgacttctgcactttatgcctccgatcttttcaaacaattgaaaagtatcatgggaacggattctttgtccgatgatgttgtattagttattgctacaacttctctggcactggttgctggtttcgttgtcttattgtggaaaaagaccacggcagatcgttccggcgagctaaagccactaatgatccctaagtctctgatggcgaaagatgaggatgatgacttagatctaggttctggaaaaacgagagtctctatcttcttcggcacacaaaccggaacagccgaaggattcgctaaagcactttcagaagagatcaaagcaagatacgaaaaggcggctgtaaaagtaatcgatttggatgattacgctgccgatgatgaccaatatgaggaaaagttgaaaaaggaaacattggctttcttttgtgtagccacgtatggtgatggtgaaccaaccgataacgccgcaagattctacaagtggtttactgaagagaacgaaagagatatcaagttgcagcaacttgcttacggcgtttttgccttaggtaacagacaatacgagcactttaacaagataggtattgtcttagatgaagagttatgcaaaaagggtgcgaagagattgattgaagtcggtttaggagatgatgatcaatctatcgaggatgactttaatgcatggaaggaatctttgtggtctgaattagataagttacttaaggacgaagatgataaatccgttgccactccatacacagccgtcattccagaatatagagtagttactcatgatccaagattcacaacacagaaatcaatggaaagtaatgtggctaatggtaatactaccatcgatattcatcatccatgtagagtagacgttgcagttcaaaaggaattgcacactcatgaatcagacagatcttgcatacatcttgaatttgatatatcacgtactggtatcacttacgaaacaggtgatcacgtgggtgtctacgctgaaaaccatgttgaaattgtagaggaagctggaaagttgttgggccatagtttagatcttgttttctcaattcatgccgataaagaggatggctcaccactagaaagtgcagtgcctccaccatttccaggaccatgcaccctaggtaccggtttagctcgttacgcggatctgttaaatcctccacgtaaatcagctctagtggccttggctgcgtacgccacagaaccttctgaggcagaaaaactgaaacatctaacttcaccagatggtaaggatgaatactcacaatggatagtagctagtcaacgttctttactagaagttatggctgctttcccatccgctaaacctcctttgggtgttttcttcgccgcaatagcgcctagactgcaaccaagatactattcaatttcatcctcacctagactggcaccatcaagagttcatgtcacatccgctttagtgtacggtccaactcctactggtagaatccataagggcgtttgttcaacatggatgaaaaacgcggttccagcagagaagtctcacgaatgttctggtgctccaatctttatcagagcctccaacttcaaactgccttccaatccttctactcctattgtcatggtcggtcctggtacaggtcttgctccattcagaggtttcttacaagagagaatggccttaaaggaggatggtgaagagttgggatcttctttgttgtttttcggctgtagaaacagacaaatggatttcatctacgaagatgaactgaataactttgtagatcaaggagttatttcagagttgataatggctttttctagagaaggtgctcagaaggagtacgtccaacacaaaatgatggaaaaggccgcacaagtttgggacttaatcaaagaggaaggctatctatatgtctgtggtgatgcaaagggtatggcaagagatgttcacagaacacttcatactatagtccaggaacaggaaggcgttagttcttctgaagcggaagcaattgtgaaaaagttacaaacagagggaagatacttgagagatgtgtggtaa

SEQ ID NO: 90 - protein, 692 aa, Arabidopsis thaliana [sequence omitted]

SEQ ID NO: 91 - DNA, 2139 bp, Artificial Sequence
  Codon-optimized CPR
atgtcttcctcttcctcttccagtacctctatgattgatttgatggctgctattattaaaggtgaaccagttatcgtctccgacccagcaaatgcctctgcttatgaatcagttgctgcagaattgtcttcaatgttgatcgaaaacagacaattcgccatgatcgtaactacatcaatcgctgttttgatcggttgtattgtcatgttggtatggagaagatccggtagtggtaattctaaaagagtcgaacctttgaaaccattagtaattaagccaagagaagaagaaatagatgacggtagaaagaaagttacaatatttttcggtacccaaactggtacagctgaaggttttgcaaaagccttaggtgaagaagctaaggcaagatacgaaaagactagattcaagatagtcgatttggatgactatgccgctgatgacgatgaatacgaagaaaagttgaagaaagaagatgttgcatttttctttttggcaacctatggtgacggtgaaccaactgacaatgcagccagattctacaaatggtttacagagggtaatgatcgtggtgaatggttgaaaaacttaaagtacggtgttttcggtttgggtaacagacaatacgaacatttcaacaaagttgcaaaggttgtcgacgatattttggtcgaacaaggtgctcaaagattagtccaagtaggtttgggtgacgatgaccaatgtatagaagatgactttactgcctggagagaagctttgtggcctgaattagacacaatcttgagagaagaaggtgacaccgccgttgctaccccatatactgctgcagtattagaatacagagtttccatccatgatagtgaagacgcaaagtttaatgatatcactttggccaatggtaacggttatacagttttcgatgcacaacacccttacaaagctaacgttgcagtcaagagagaattacatacaccagaatccgacagaagttgtatacacttggaatttgatatcgctggttccggtttaaccatgaagttgggtgaccatgtaggtgttttatgcgacaatttgtctgaaactgttgatgaagcattgagattgttggatatgtcccctgacacttattttagtttgcacgctgaaaaagaagatggtacaccaatttccagttctttaccacctccattccctccatgtaacttaagaacagccttgaccagatacgcttgcttgttatcatcccctaaaaagtccgccttggttgctttagccgctcatgctagtgatcctactgaagcagaaagattgaaacacttagcatctccagccggtaaagatgaatattcaaagtgggtagttgaatctcaaagatcattgttagaagttatggcagaatttccatctgccaagcctccattaggtgtcttctttgctggtgtagcacctagattgcaaccaagattctactcaatcagttcttcacctaagatcgctgaaactagaattcatgttacatgtgcattagtctacgaaaagatgccaaccggtagaattcacaagggtgtatgctctacttggatgaaaaatgctgttccttacgaaaaatcagaaaagttgttcttaggtagaccaatcttcgtaagacaatcaaacttcaagttgccttctgattcaaaggttccaataatcatgataggtcctggtacaggtttagccccattcagaggtttcttgcaagaaagattggctttagttgaatctggtgtcgaattaggtccttcagttttgttctttggttgtagaaacagaagaatggatttcatctatgaagaagaattgcaaagattcgtcgaatctggtgcattggccgaattatctgtagctttttcaagagaaggtccaactaaggaatacgttcaacataagatgatggataaggcatccgacatatggaacatgatcagtcaaggtgcttatttgtacgtttgcggtgacgcaaagggtatggccagagatgtccatagatctttgcacacaattgctcaagaacaaggttccatggatagtaccaaagctgaaggtttcgtaaagaacttacaaacttccggtagatacttgagagatgtctggtga

SEQ ID NO: 92 - protein, 712 aa, Arabidopsis thaliana
MSSSSSSSTSMIDLMAAIIKGEPVIVSDPANASAYESVAAELSSMLIENRQFAMIVTTSIAVLIGCIVMLVWRRSGSGNSKRVEPLKPLVIKPREEEIDDGRKKVTIFFGTQTGTAEGFAKALGEEAKARYEKTRFKIVDLDDYAADDDEYEEKLKKEDVAFFFLATYGDGEPTDNAARFYKWFTEGNDRGEWLKNLKYGVFGLGNRQYEHFNKVAKVVDDILVEQGAQRLVQVGLGDDDQCIEDDFTAWREALWPELDTILREEGDTAVATPYTAAVLEYRVSIHDSEDAKFNDITLANGNGYTVFDAQHPYKANVAVKRELHTPESDRSCIHLEFDIAGSGLTMKLGDHVGVLCDNLSETVDEALRLLDMSPDTYFSLHAEKEDGTPISSSLPPPFPPCNLRTALTRYACLLSSPKKSALVALAAHASDPTEAERLKHLASPAGKDEYSKWVVESQRSLLEVMAEFPSAKPPLGVFFAGVAPRLQPRFYSISSSPKIAETRIHVTCALVYEKMPTGRIHKGVCSTWMKNAVPYEKSEKLFLGRPIFVRQSNFKLPSDSKVPIIMIGPGTGLAPFRGFLQERLALVESGVELGPSVLFFGCRNRRMDFIYEEELQRFVESGALAELSVAFSREGPTKEYVQHKMMDKASDIWNMISQGAYLYVCGDAKGMARDVHRSLHTIAQEQGSMDSTKAEGFVKNLQTSGRYLRDVW

SEQ ID NO: 93 - DNA, 1503 bp, Artificial Sequence
  Codon-optimized KAH
atggaagcctcttacctatacatttctattttgcttttactggcatcatacctgttcaccactcaacttagaaggaagagcgctaatctaccaccaaccgtgtttccatcaataccaatcattggacacttatacttactcaaaaagcctctttatagaactttagcaaaaattgccgctaagtacggaccaatactgcaattacaactcggctacagacgtgttctggtgatttcctcaccatcagcagcagaagagtgctttaccaataacgatgtaatcttcgcaaatagacctaagacattgtttggcaaaatagtgggtggaacatcccttggcagtttatcctacggcgatcaatggcgtaatctaaggagagtagcttctatcgaaatcctatcagttcataggttgaacgaatttcatgatatcagagtggatgagaacagattgttaattagaaaacttagaagttcatcttctcctgttactcttataacagtcttttatgctctaacattgaacgtcattatgagaatgatctctggcaaaagatatttcgacagtggggatagagaattggaggaggaaggtaagagatttcgagaaatcttagacgaaacgttgcttctagccggtgcttctaatgttggcgactacttaccaatattgaactggttgggagttaagtctcttgaaaagaaattgatcgctttgcagaaaaagagagatgactttttccagggtttgattgaacaggttagaaaatctcgtggtgctaaagtaggcaaaggtagaaaaacgatgatcgaactcttattatctttgcaagagtcagaacctgagtactatacagatgctatgataagatcttttgtcctaggtctgctggctgcaggtagtgatacttcagcgggcactatggaatgggccatgagcttactggtcaatcacccacatgtattgaagaaagctcaagctgaaatcgatagagttatcggtaataacagattgattgacgagtcagacattggaaatatcccttacatcgggtgtattatcaatgaaactctaagactctatccagcagggccattgttgttcccacatgaaagttctgccgactgcgttatttccggttacaatatacctagaggtacaatgttaatcgtaaaccaatgggcgattcatcacgatcctaaagtctgggatgatcctgaaacctttaaacctgaaagatttcaaggattagaaggaactagagatggtttcaaacttatgccattcggttctgggagaagaggatgtccaggtgaaggtttggcaataaggctgttagggatgacactaggctcagtgatccaatgttttgattgggagagagtaggagatgagatggttgacatgacagaaggtttgggtgtcacacttcctaaggccgttccattagttgccaaatgtaagccacgttccgaaatgactaatctcctatccgaactttaa

SEQ ID NO: 94 - protein, 500 aa, Stevia rebaudiana
MEASYLYISILLLLASYLFTTQLRRKSANLPPTVFPSIPIIGHLYLLKKPLYRTLAKIAAKYGPILQLQLGYRRVLVISSPSAAEECFTNNDVIFANRPKTLFGKIVGGTSLGSLSYGDQWRNLRRVASIEILSVHRLNEFHDIRVDENRLLIRKLRSSSSPVTLITVFYALTLNVIMRMISGKRYFDSGDRELEEEGKRFREILDETLLLAGASNVGDYLPILNWLGVKSLEKKLIALQKKRDDFFQGLIEQVRKSRGAKVGKGRKTMIELLLSLQESEPEYYTDAMIRSFVLGLLAAGSDTSAGTMEWAMSLLVNHPHVLKKAQAEIDRVIGNNRLIDESDIGNIPYIGCIINETLRLYPAGPLLFPHESSADCVISGYNIPRGTMLIVNQWAIHHDPKVWDDPETFKPERFQGLEGTRDGFKLMPFGSGRRGCPGEGLAIRLLGMTLGSVIQCFDWERVGDEMVDMTEGLGVTLPKAVPLVAKCKPRSEMTNLLSEL

SEQ ID NO: 95 - DNA, 1572 bp, Rubus suavissimus
atggaagtaacagtagctagtagtgtagccctgagcctggtctttattagcatagtagtaagatgggcatggagtgtggtgaattgggtgtggtttaagccgaagaagctggaaagatttttgagggagcaaggccttaaaggcaattcctacaggtttttatatggagacatgaaggagaactctatcctgctcaaacaagcaagatccaaacccatgaacctctccacctcccatgacatagcacctcaagtcaccccttttgtcgaccaaaccgtgaaagcttacggtaagaactcttttaattgggttggccccataccaagggtgaacataatgaatccagaagatttgaaggacgtcttaacaaaaaatgttgactttgttaagccaatatcaaacccacttatcaagttgctagctacaggtattgcaatctatgaaggtgagaaatggactaaacacagaaggattatcaacccaacattccattcggagaggctaaagcgtatgttaccttcatttcaccaaagttgtaatgagatggtcaaggaatgggagagcttggtgtcaaaagagggttcatcatgtgagttggatgtctggccttttcttgaaaatatgtcggcagatgtgatctcgagaacagcatttggaactagctacaaaaaaggacagaaaatctttgaactcttgagagagcaagtaatatatgtaacgaaaggctttcaaagtttttacattccaggatggaggtttctcccaactaagatgaacaagaggatgaatgagattaacgaagaaataaaaggattaatcaggggtattataattgacagagagcaaatcattaaggcaggtgaagaaaccaacgatgacttattaggtgcacttatggagtcaaacttgaaggacattcgggaacatgggaaaaacaacaaaaatgttgggatgagtattgaagatgtaattcaggagtgtaagctgttttactttgctgggcaagaaaccacttcagtgttgctggcttggacaatggttttacttggtcaaaatcagaactggcaagatcgagcaagacaagaggttttgcaagtctttggaagcagcaagccagattttgatggtctagctcaccttaaagtcgtaaccatgattttgcttgaagttcttcgattatacccaccagtcattgaacttattcgaaccattcacaagaaaacacaacttgggaagctctcactaccagaaggagttgaagtccgcttaccaacactgctcattcaccatgacaaggaactgtggggtgatgatgcaaaccagttcaatccagagaggttttcggaaggagtttccaaagcaacaaagaaccgactctcattcttccccttcggagccggtccacgcatttgcattggacagaacttttctatgatggaagcaaagttggccttagcattgatcttgcaacacttcacctttgagctttctccatctcatgcacatgctccttcccatcgtataacccttcaaccacagtatggtgttcgtatcattttacatcgacgttag

SEQ ID NO: 96 - DNA, 1572 bp, Artificial Sequence
  Codon-optimized KAH
atggaagtcactgtcgcctcttctgtcgctttatccttagtcttcatttccattgtcgtcagatgggcttggtccgttgtcaactgggtttggttcaaaccaaagaagttggaaagattcttgagagagcaaggtttgaagggtaattcttatagattcttgtacggtgacatgaaggaaaattctattttgttgaagcaagccagatccaaaccaatgaacttgtctacctctcatgatattgctccacaagttactccattcgtcgatcaaactgttaaagcctacggtaagaactctttcaattgggttggtccaattcctagagttaacatcatgaacccagaagatttgaaggatgtcttgaccaagaacgttgacttcgttaagccaatttccaacccattgattaaattgttggctactggtattgccatttacgaaggtgaaaagtggactaagcatagaagaatcatcaaccctaccttccactctgaaagattgaagagaatgttaccatctttccatcaatcctgtaatgaaatggttaaggaatgggaatccttggtttctaaagaaggttcttcttgcgaattggatgtttggccattcttggaaaatatgtctgctgatgtcatttccagaaccgctttcggtacctcctacaagaagggtcaaaagattttcgaattgttgagagagcaagttatttacgttaccaagggtttccaatccttctacatcccaggttggagattcttgccaactaaaatgaacaagcgtatgaacgagatcaacgaagaaattaaaggtttgatcagaggtattattatcgacagagaacaaattattaaagctggtgaagaaaccaacgatgatttgttgggtgctttgatggagtccaacttgaaggatattagagaacatggtaagaacaacaagaatgttggtatgtctattgaagatgttattcaagaatgtaagttattctacttcgctggtcaagagaccacttctgttttgttagcctggactatggtcttgttaggtcaaaaccaaaattggcaagatagagctagacaagaagttttgcaagtcttcggttcttccaagccagactttgatggtttggcccacttgaaggttgttactatgattttgttagaagttttgagattgtacccaccagtcattgagttaatcagaaccattcataaaaagactcaattgggtaaattatctttgccagaaggtgttgaagtcagattaccaaccttgttgattcaccacgataaggaattatggggtgacgacgctaatcaatttaatccagaaagattttccgaaggtgtttccaaggctaccaaaaaccgtttgtccttcttcccatttggtgctggtccacgtatttgtatcggtcaaaacttttccatgatggaagccaagttggctttggctttaatcttgcaacacttcactttcgaattgtctccatcccatgcccacgctccttctcatagaatcactttacaaccacaatacggtgtcagaatcatcttacacagaagataa

SEQ ID NO: 97 - protein, 523 aa, Rubus suavissimus
MEVTVASSVALSLVFISIVVRWAWSVVNWVWFKPKKLERFLREQGLKGNSYRFLYGDMKENSILLKQARSKPMNLSTSHDIAPQVTPFVDQTVKAYGKNSFNWVGPIPRVNIMNPEDLKDVLTKNVDFVKPISNPLIKLLATGIAIYEGEKWTKHRRIINPTFHSERLKRMLPSFHQSCNEMVKEWESLVSKEGSSCELDVWPFLENMSADVISRTAFGTSYKKGQKIFELLREQVIYVTKGFQSFYIPGWRFLPTKMNKRMNEINEEIKGLIRGIIIDREQIIKAGEETNDDLLGALMESNLKDIREHGKNNKNVGMSIEDVIQECKLFYFAGQETTSVLLAWTMVLLGQNQNWQDRARQEVLQVFGSSKPDFDGLAHLKVVTMILLEVLRLYPPVIELIRTIHKKTQLGKLSLPEGVEVRLPTLLIHHDKELWGDDANQFNPERFSEGVSKATKNRLSFFPFGAGPRICIGQNFSMMEAKLALALILQHFTFELSPSHAHAPSHRITLQPQYGVRIILHRR

SEQ ID NO: 98 - DNA, 1566 bp, Prunus avium
atggaagcatcaagggctagttgtgttgcgctatgtgttgtttgggtgagcatagtaattacattggcatggagggtgctgaattgggtgtggttgaggccaaagaaactagaaagatgcttgagggagcaaggccttacaggcaattcttacaggcttttgtttggagacaccaaggatctctcgaagatgctggaacaaacacaatccaaacccatcaaactctccacctcccatgatatagcgccacgagtcaccccatttttccatcgaactgtgaactctaatggcaagaattcttttgtttggatgggccctataccaagagtgcacatcatgaatccagaagatttgaaagatgccttcaacagacatgatgattttcataagacagtaaaaaatcctatcatgaagtctccaccaccgggcattgtaggcattgaaggtgagcaatgggctaaacacagaaagattatcaacccagcattccatttagagaagctaaagggtatggtaccaatattttaccaaagttgtagcgagatgattaacaaatgggagagcttggtgtccaaagagagttcatgtgagttggatgtgtggccttatcttgaaaattttaccagcgatgtgatttcccgagctgcatttggaagtagctatgaagagggaaggaaaatatttcaactactaagagaggaagcaaaagtttattcggtagctctacgaagtgtttacattccaggatggaggtttctaccaaccaagcagaacaagaagacgaaggaaattcacaatgaaattaaaggcttacttaagggcattataaataaaagggaagaggcgatgaaggcaggggaagccactaaagatgacttactaggaatacttatggagtccaacttcagggaaattcaggaacatgggaacaacaaaaatgctggaatgagtattgaagatgtaattggagagtgtaagttgttttactttgctgggcaagagaccacttcggtgttgcttgtttggacaatgattttactaagccaaaatcaggattggcaagctcgtgcaagagaagaggtcttgaaagtctttggaagcaacatcccaacctatgaagagctaagtcacctaaaagttgtgaccatgattttacttgaagttcttcgattatacccatcagtcgttgcgcttcctcgaaccactcacaagaaaacacagcttggaaaattatcattaccagctggagtggaagtctccttgcccatactgcttgttcaccatgacaaagagttgtggggtgaggatgcaaatgagttcaagccagagaggttttcagagggagtttcaaaggcaacaaagaacaaatttacatacttacctttcggagggggtccaaggatttgcattggacaaaactttgccatggtggaagctaaattggccttggccctgattttacaacactttgcctttgagctttctccatcctatgctcatgctccttctgcagttataacccttcaacctcaatttggtgctcatatcattttgcataaacgttga

SEQ ID NO: 99 - DNA, 1567 bp, Artificial Sequence
  Codon-optimized KAH
atggaagcttctagagcatcttgtgttgctttgtgtgttgtttgggtttccatcgttattactttggcttggagagttttgaattgggtctggttaagaccaaaaaagttggaaagatgcttgagagaacaaggtttgactggtaactcttacagattgttgttcggtgataccaaggacttgtctaagatgttggaacaaactcaatccaagcctatcaagttgtctacctctcatgatattgctccaagagttactccattcttccatagaactgttaactccaacggtaagaactcttttgtttggatgggtccaattccaagagtccatattatgaaccctgaagatttgaaggacgctttcaacagacatgatgatttccataagaccgtcaagaacccaattatgaagtctccaccaccaggtatagttggtattgaaggtgaacaatgggccaaacatagaaagattattaacccagccttccacttggaaaagttgaaaggtatggttccaatcttctaccaatcctgctctgaaatgattaacaagtgggaatccttggtttccaaagaatcttcctgtgaattggatgtctggccatatttggaaaacttcacctccgatgttatttccagagctgcttttggttcttcttacgaagaaggtagaaagatcttccaattattgagagaagaagccaaggtttactccgttgctttgagatctgtttacattccaggttggagattcttgccaactaagcaaaacaaaaagaccaaagaaatccacaacgaaatcaagggtttgttgaagggtatcatcaacaagagagaagaagctatgaaggctggtgaagctacaaaagatgatttgttgggtatcttgatggaatccaacttcagagaaatccaagaacacggtaacaacaagaatgccggtatgtctattgaagatgttatcggtgaatgcaagttgttctactttgctggtcaagaaactacctccgttttgttggtttggaccatgattttgttgtcccaaaatcaagattggcaagctagagctagagaagaagtcttgaaagttttcggttctaacatcccaacctacgaagaattgtctcacttgaaggttgtcactatgatcttgttggaagtattgagattatacccatccgttgttgcattgccaagaactactcataagaaaactcaattgggtaaattgtccttgccagctggtgttgaagtttctttgccaattttgttagtccaccacgacaaagaattgtggggtgaagatgctaatgaattcaagccagaaagattctccgaaggtgtttctaaagctaccaagaacaagttcacttacttgccatttggtggtggtccaagaatatgtattggtcaaaatttcgctatggtcgaagctaaattggctttggctttgatcttgcaacatttcgctttcgaattgtcaccatcttatgctcatgctccatctgctgttattacattgcaaccacaatttggtgcccatatcatcttgcataagagataac

SEQ ID NO: 100 - protein, 521 aa, Prunus avium
MEASRASCVALCVVWVSIVITLAWRVLNWVWLRPKKLERCLREQGLTGNSYRLLFGDTKDLSKMLEQTQSKPIKLSTSHDIAPRVTPFFHRTVNSNGKNSFVWMGPIPRVHIMNPEDLKDAFNRHDDFHKTVKNPIMKSPPPGIVGIEGEQWAKHRKIINPAFHLEKLKGMVPIFYQSCSEMINKWESLVSKESSCELDVWPYLENFTSDVISRAAFGSSYEEGRKIFQLLREEAKVYSVALRSVYIPGWRFLPTKQNKKTKEIHNEIKGLLKGIINKREEAMKAGEATKDDLLGILMESNFREIQEHGNNKNAGMSIEDVIGECKLFYFAGQETTSVLLVWTMILLSQNQDWQARAREEVLKVFGSNIPTYEELSHLKVVTMILLEVLRLYPSVVALPRTTHKKTQLGKLSLPAGVEVSLPILLVHHDKELWGEDANEFKPERFSEGVSKATKNKFTYLPFGGGPRICIGQNFAMVEAKLALALILQHFAFELSPSYAHAPSAVITLQPQFGAHIILHKR

SEQ ID NO: 101 - protein, 517 aa, Prunus mume
ASWVAVLSVVWVSMVIAWAWRVLNWVWLRPKKLEKCLREQGLAGNSYRLLFGDTKDLSKMLEQTQSKPIKLSTSHDIAPHVTPFFHQTVNSYGKNSFVWMGPIPRVHIMNPEDLKDTFNRHDDFHKVVKNPIMKSLPQGIVGIEGEQWAKHRKIINPAFHLEKLKGMVPIFYRSCSEMINKWESLVSKESSCELDVWPYLENFTSDVISRAAFGSSYEEGRKIFQLLREEAKIYTVAMRSVYIPGWRFLPTKQNKKAKEIHNEIKGLLKGIINKREEAMKAGEATKDDLLGILMESNFREIQEHGNNKNAGMSIEDVIGECKLFYFAGQETTSVLLVWTMVLLSQNQDWQARAREEVLQVFGSNIPTYEELSQLKVVTMILLEVLRLYPSVVALPRTTHKKTQLGKLSLPAGVEVSLPILLVHHDKELWGEDANEFKPERFSEGVSKATKNQFTYFPFGGGPRICIGQNFAMMEAKLALSLILRHFALELSPLYAHAPSVTITLQPQYGAHIILHKR

SEQ ID NO: 102 - protein, 521 aa, Prunus mume
MEASRPSCVALSVVLVSIVIAWAWRVLNWVWLRPNKLERCLREQGLTGNSYRLLFGDTKEISMMVEQAQSKPIKLSTTHDIAPRVIPFSHQIVYTYGRNSFVWMGPTPRVTIMNPEDLKDAFNKSDEFQRAISNPIVKSISQGLSSLEGEKWAKHRKIINPAFHLEKLKGMLPTFYQSCSEMINKWESLVFKEGSREMDVWPYLENLTSDVISRAAFGSSYEEGRKIFQLLREEAKFYTIAARSVYIPGWRFLPTKQNKRMKEIHKEVRGLLKGIINKREDAIKAGEAAKGNLLGILMESNFREIQEHGNNKNAGMSIEDVIGECKLFYFAGQETTSVLLVWTLVLLSQNQDWQARAREEVLQVFGTNIPTYDQLSHLKVVTMILLEVLRLYPAVVELPRTTYKKTQLGKFLLPAGVEVSLHIMLAHHDKELWGEDAKEFKPERFSEGVSKATKNQFTYFPFGAGPRICIGQNFAMLEAKLALSLILQHFTFELSPSYAHAPSVTITLHPQFGAHFILHKR

SEQ ID NO: 103 - protein, 514 aa, Prunus mume
CVALSVVLVSIVIAWAWRVLNWVWLRPNKLERCLREQGLTGNSYRLLFGDTKEISMMVEQAQSKPIKLSTTHDIAPRVIPFSHQIVYTYGRNSFVWMGPTPRVTIMNPEDLKDAFNKSDEFQRAISNPIVKSISQGLSSLEGEKWAKHRKIINPAFHLEKLKGMLPTFYQSCSEMINKWESLVFKEGSREMDVWPYLENLTSDVISRAAFGSSYEEGRKIFQLLREEAKFYTIAARSVYIPGWRFLPTKQNKRMKEIHKEVRGLLKGIINKREDAIKAGEAAKGNLLGILMESNFREIQEHGNNKNAGMSIEDVIGECKLFYFAGQETTSVLLVWTLVLLSQNQDWQARAREEVLQVFGTNIPTYDQLSHLKVVTMILLEVLRLYPAVVELPRTTYKKTQLGKFLLPAGVEVSLHIMLAHHDKELWGEDAKEFKPERFSEGVSKATKNQFTYFPFGAGPRICIGQNFAMLEAKLALSLILQHFTFELSPSYAHAPSVTITLHPQFGAHFILHKR

SEQ ID NO: 104 - protein, 418 aa, Prunus persica
MGPIPRVHIMNPEDLKDTFNRHDDFHKVVKNPIMKSLPQGIVGIEGDQWAKHRKIINPAFHLEKLKGMVPIFYQSCSEMINIWKSLVSKESSCELDVWPYLENFTSDVISRAAFGSSYEEGRKIFQLLREEAKVYTVAVRSVYIPGWRFLPTKQNKKTKEIHNEIKGLLKGIINKREEAMKAGEATKDDLLGILMESNFREIQEHGNNKNAGMSIEDVIGECKLFYFAGQETTSVLLVWTMVLLSQNQDWQARAREEVLQVFGSNIPTYEELSHLKVVTMILLEVLRLYPSVVALPRTTHKKTQLGKLSLPAGVEVSLPILLVHHDKELWGEDANEFKPERFSEGVSKATKNQFTYFPFGGGPRICIGQNFAMMEAKLALSLILQHFTFELSPQYSHAPSVTITLQPQYGAHLILHKR

SEQ ID NO: 105 - DNA, 1578 bp, Artificial Sequence
  Codon-optimized KAH
atgggtttgttcccattagaggattcctacgcgctggtctttgaaggactagcaataacactggctttgtactatctactgtctttcatctacaaaacatctaaaaagacatgtacacctcctaaagcatctggtgaaatcattccaattacaggaatcatattgaatctgctatctggctcaagtggtctacctattatcttagcacttgcctctttagcagacagatgtggtcctattttcaccattaggctgggtattaggagagtgctagtagtatcaaattgggaaatcgctaaggagattttcactacccacgatttgatagtttctaatagaccaaaatacttagccgctaagattcttggtttcaattatgtttcattctctttcgctccatacggcccatattgggtcggaatcagaaagattattgctacaaaactaatgtcttcttccagacttcagaagttgcaatttgtaagagtttttgaactagaaaactctatgaaatctatcagagaatcatggaaggagaaaaaggatgaagagggaaaggtattagttgagatgaaaaagtggttctgggaactgaatatgaacatagtgttaaggacagttgctggtaaacaatacactggtacagttgatgatgccgatgcaaagcgtatctccgagttattcagagaatggtttcactacactggcagatttgtcgttggagacgcttttccttttctaggttggttggacctgggcggatacaaaaagacaatggaattagttgctagtagattggactcaatggtcagtaaatggttagatgagcatcgtaaaaagcaagctaacgatgacaaaaaggaggatatggatttcatggatatcatgatctccatgacagaagcaaattcaccacttgaaggatacggcactgatactattatcaagaccacatgtatgactttgattgtttcaggagttgatacaacctcaatcgtacttacttgggccttatcacttttgttaaacaacagagatactttgaaaaaggcacaagaggaattagatatgtgcgtaggtaaaggaagacaagtcaacgagtctgatcttgttaacttgatatacttggaagcagtgcttaaagaggctttaagactttacccagcagcgttcttaggcggaccaagagcattcttggaagattgtactgttgctggttatagaattccaaagggcacctgcttgttgattaacatgtggaaactgcatagagatccaaacatttggagtgatccttgcgaattcaagccagaaagatttttgacacctaatcaaaaggatgttgatgtgatcggtatggatttcgaattgataccatttggtgccggcagaagatattgtccaggtactagattggctttacagatgttgcatatcgtattagcgacattgctgcaaaacttcgaaatgtcaacaccaaacgatgcgccagtcgatatgactgcttctgttggcatgacaaatgccaaagcatcacctttagaagtcttgctatcacctcgtgttaaatggtcctaa

SEQ ID NO: 106 - protein, 522 aa, Stevia rebaudiana
MGLFPLEDSYALVFEGLAITLALYYLLSFIYKTSKKTCTPPKASGEHPITGHLNLLSGSSGLPHLALASLADRCGPIFTIRLGIRRVLVVSNWEIAKEIFTTHDLIVSNRPKYLAAKILGFNYVSFSFAPYGPYWVGIRKIIATKLMSSSRLQKLQFVRVFELENSMKSIRESWKEKKDEEGKVLVEMKKWFWELNMNIVLRTVAGKQYTGTVDDADAKRISELFREWFHYTGRFVVGDAFPFLGWLDLGGYKKTMELVASRLDSMVSKWLDEHRKKQANDDKKEDMDFMDIMISMTEANSPLEGYGTDTIIKTTCMTLIVSGVDTTSIVLTWALSLLLNNRDTLKKAQEELDMCVGKGRQVNESDLVNLIYLEAVLKEALRLYPAAFLGGPRAFLEDCTVAGYRIPKGTCLLINMWKLHRDPNIWSDPCEFKPERFLTPNQKDVDVIGMDFELIPFGAGRRYCPGTRLALQMLHIVLATLLQNFEMSTPNDAPVDMTASVGMTNAKASPLEVLLSPRVKWS

SEQ ID NO: 107 - DNA, 1431 bp, Artificial Sequence
  Codon-optimized KAH
atgatacaagttttaactccaattctactcttcctcatcttcttcgttttctggaaagtctacaaacatcaaaagactaaaatcaatctaccaccaggttccttcggctggccatttttgggtgaaaccttagccttacttagagcaggctgggattctgagccagaaagattcgtaagagagcgtatcaaaaagcatggatctccacttgttttcaagacatcactatttggagacagattcgctgttctttgcggtccagctggtaataagtttttgttctgcaacgaaaacaaattagtggcatcttggtggccagtccctgtaaggaagttgttcggtaaaagtttactcacaataagaggagatgaagcaaaatggatgagaaaaatgctattgtcttacttgggtccagatgcatttgccacacattatgccgttactatggatgttgtaacacgtagacatattgatgtccattggaggggcaaggaggaagttaatgtatttcaaacagttaagttgtacgcattcgaattagcttgtagattattcatgaacctagatgacccaaaccacatcgcgaaactcggtagtcttttcaacattttcctcaaagggatcatcgagcttcctatagacgttcctggaactagattttactccagtaaaaaggccgcagctgccattagaattgaattgaaaaagctcattaaagctagaaaactcgaattgaaggagggtaaggcgtcttcttcacaggacttgctttctcatctattaacatcacctgatgagaatgggatgttcttgacagaagaggaaatagtcgataacattctacttttgttattcgctggtcacgatacctctgcactatcaataacacttttgatgaaaaccttaggtgaacacagtgatgtgtacgacaaggttttgaaggaacaattagaaatttccaaaacaaaggaggcttgggaatcactaaagtgggaagatatccagaagatgaagtactcatggtcagtaatctgtgaagtcatgagattgaatcctcctgtcatagggacatacagagaggcgttggttgatatcgactatgctggttacactatcccaaaaggatggaagttgcattggtcagctgtttctactcaaagagacgaagccaatttcgaagatgtaactagattcgatccatccagatttgaaggggcaggccctactccattcacatttgtgcctttcggtggaggtcctagaatgtgtttaggcaaagagtttgccaggttagaagtgttagcatttctccacaacattgttaccaactttaagtgggatcttctaatccctgatgagaagatcgaatatgatccaatggctactccagctaagggcttgccaattagacttcatccacaccaagtctaa

SEQ ID NO: 108 - protein, 476 aa, Stevia rebaudiana
MIQVLTPILLFLIFFVFWKVYKHQKTKINLPPGSFGWPFLGETLALLRAGWDSEPERFVRERIKKHGSPLVFKTSLFGDRFAVLCGPAGNKFLFCNENKLVASWWPVPVRKLFGKSLLTIRGDEAKWMRKMLLSYLGPDAFATHYAVTMDVVTRRHIDVHWRGKEEVNVFQTVKLYAFELACRLFMNLDDPNHIAKLGSLFNIFLKGIIELPIDVPGTRFYSSKKAAAAIRIELKKLIKARKLELKEGKASSSQDLLSHLLTSPDENGMFLTEEEIVDNILLLLFAGHDTSALSITLLMKTLGEHSDVYDKVLKEQLEISKTKEAWESLKWEDIQKMKYSWSVICEVMRLNPPVIGTYREALVDIDYAGYTIPKGWKLHWSAVSTQRDEANFEDVTRFDPSRFEGAGPTPFTFVPFGGGPRMCLGKEFARLEVLAFLHNIVTNFKWDLLIPDEKIEYDPMATPAKGLPIRLHPHQV

SEQ ID NO: 109 - DNA, 1578 bp, Artificial Sequence
  Codon-optimized KAH
atggagtctttagtggttcatacagtaaatgctatctggtgtattgtaatcgtcgggattttctcagttggttatcacgtttacggtagagctgtggtcgaacaatggagaatgagaagatcactgaagctacaaggtgttaaaggcccaccaccatccatcttcaatggtaacgtctcagaaatgcaacgtatccaatccgaagctaaacactgctctggcgataacattatctcacatgattattcttcttcattattcccacacttcgatcactggagaaaacagtacggcagaatctacacatactctactggattaaagcaacacttgtacatcaatcatccagaaatggtgaaggagctatctcagactaacacattgaacttgggtagaatcacccatataaccaaaagattgaatcctatcttaggtaacggaatcataacctctaatggtcctcattgggcccatcagcgtagaattatcgcctacgagtttactcatgataagatcaagggtatggttggtttgatggttgagtctgctatgcctatgttgaataagtgggaggagatggtaaagagaggcggagaaatgggatgcgacataagagttgatgaggacttgaaagatgtttcagcagatgtgattgcaaaagcctgtttcggatcctcattttctaaaggtaaggctattttctctatgataagagatttgcttacagctatcacaaagagaagtgttctattcagattcaacggattcactgatatggtctttgggagtaaaaagcatggtgacgttgatatagacgctttagaaatggaattggaatcatccatttgggaaactgtcaaggaacgtgaaatagaatgtaaagatactcacaaaaaggatctgatgcaattgattttggaaggggcaatgcgttcatgtgacggtaacctttgggataaatcagcatatagaagatttgttgtagataattgtaaatctatctacttcgcagggcatgatagtacagctgtctcagtgtcatggtgtttgatgttactggccctaaacccatcatggcaagttaagatccgtgatgaaattctgtcttcttgcaaaaatggtattccagatgccgaaagtatcccaaaccttaaaacagtgactatggttattcaagagacaatgagattataccctccagcaccaatcgtcgggagagaagcctctaaagatatcagattgggcgatctagttgttcctaaaggcgtctgtatatggacactaataccagctttacacagagatcctgagatttggggaccagatgcaaacgatttcaaaccagaaagattttctgaaggaatttcaaaggcttgtaagtatcctcaaagttacattccatttggtctgggtcctagaacatgcgttggtaaaaactttggcatgatggaagtaaaggttcttgtttccctgattgtctccaagttctctttcactctatctcctacctaccaacatagtcctagtcacaaacttttagtagaaccacaacatggggtggtaattagagtggtttaa

SEQ ID NO: 110 - protein, 525 aa, Arabidopsis thaliana
MESLVVHTVNAIWCIVIVGIFSVGYHVYGRAVVEQWRMRRSLKLQGVKGPPPSIFNGNVSEMQRIQSEAKHCSGDNIISHDYSSSLFPHFDHWRKQYGRIYTYSTGLKQHLYINHPEMVKELSQTNTLNLGRITHITKRLNPILGNGIITSNGPHWAHQRRIIAYEFTHDKIKGMVGLMVESAMPMLNKWEEMVKRGGEMGCDIRVDEDLKDVSADVIAKACFGSSFSKGKAIFSMIRDLLTAITKRSVLFRFNGFTDMVFGSKKHGDVDIDALEMELESSIWETVKEREIECKDTHKKDLMQLILEGAMRSCDGNLWDKSAYRRFVVDNCKSIYFAGHDSTAVSVSWCLMLLALNPSWQVKIRDEILSSCKNGIPDAESIPNLKTVTMVIQETMRLYPPAPIVGREASKDIRLGDLVVPKGVCIWTLIPALHRDPEIWGPDANDFKPERFSEGISKACKYPQSYIPFGLGPRTCVGKNFGMMEVKVLVSLIVSKFSFTLSPTYQHSPSHKLLVEPQHGVVIRVV

SEQ ID NO: 111 - DNA, 1590 bp, Artificial Sequence
  Codon-optimized KAH
atgtacttcctactacaatacctcaacatcacaaccgttggtgtctttgccacattgtttctctcttattgtttacttctctggagaagtagagcgggtaacaaaaagattgccccagaagctgccgctgcatggcctattatcggccacctccacttacttgcaggtggatcccatcaactaccacatattacattgggtaacatggcagataagtacggtcctgtattcacaatcagaataggcttgcatagagctgtagttgtctcatcttgggaaatggcaaaggaatgttcaacagctaatgatcaagtgtcttcttcaagacctgaactattagcttctaagttgttgggttataactacgccatgtttggtttttcaccatacggttcatactggagagaaatgagaaagatcatctctctcgaattactatctaattccagattggaactattgaaagatgttagagcctcagaagttgtcacatctattaaggaactatacaaattgtgggcggaaaagaagaatgagtcaggattggtttctgtcgagatgaaacaatggttcggagatttgactttaaacgtgatcttgagaatggtggctggtaaaagatacttctccgcgagtgacgcttcagaaaacaaacaggcccagcgttgtagaagagtcttcagagaattcttccatctctccggcttgtttgtggttgctgatgctataccttttcttggatggctcgattggggaagacacgagaagaccttgaaaaagaccgccatagaaatggattccatcgcccaggagtggcttgaggaacatagacgtagaaaagattctggagatgataattctacccaagatttcatggacgttatgcaatctgtgctagatggcaaaaatctaggcggatacgatgctgatacgattaacaaggctacatgcttaactcttatatcaggtggcagtgatactactgtagtttctttgacatgggctcttagtcttgtgttaaacaatagagatactttgaaaaaggcacaggaagagttagacatccaagtcggtaaggaaagattggttaacgagcaagacatcagtaagttagtttacttgcaagcaatagtaaaagagacactcagactttatccaccaggtcctttgggtggtttgagacaattcactgaagattgtacactaggtggctatcacgtttcaaaaggaactagattaatcatgaacttatccaagattcaaaaagatccacgtatttggtctgatcctactgaattccaaccagagagattccttacgactcataaagatgtcgatccacgtggtaaacactttgaattcattccattcggtgcaggaagacgtgcatgtcctggtatcacattcggattacaagtactacatctaacattggcatctttcttgcatgcgtttgaattttcaacaccatcaaatgagcaggttaacatgagagaatcattaggtcttacgaatatgaaatctaccccattagaagttttgatttctccaagactatcccttaattgcttcaaccttatgaaaatttga

SEQ ID NO: 112 - protein, 526 aa, Vitis vinifera
MYFLLQYLNITTVGVFATLFLSYCLLLWRSRAGNKKIAPEAAAAWPIIGHLHLLAGGSHQLPHITLGNMADKYGPVFTIRIGLHRAVVVSSWEMAKECSTANDQVSSSRPELLASKLLGYNYAMFGFSPYGSYWREMRKIISLELLSNSRLELLKDVRASEVVTSIKELYKLWAEKKNESGLVSVEMKQWFGDLTLNVILRMVAGKRYFSASDASENKQAQRCRRVFREFFHLSGLFVVADAIPFLGWLDWGRHEKTLKKTAIEMDSIAQEWLEEHRRRKDSGDDNSTQDFMDVMQSVLDGKNLGGYDADTINKATCLTLISGGSDTTVVSLTWALSLVLNNRDTLKKAQEELDIQVGKERLVNEQDISKLVYLQAIVKETLRLYPPGPLGGLRQFTEDCTLGGYHVSKGTRLIMNLSKIQKDPRIWSDPTEFQPERFLTTHKDVDPRGKHFEFIPFGAGRRACPGITFGLQVLHLTLASFLHAFEFSTPSNEQVNMRESLGLTNMKSTPLEVLISPRLSSCSLYN

SEQ ID NO: 113 - DNA, 1440 bp, Artificial Sequence
  Codon-optimized KAH
atggaacctaacttttacttgtcattactattgttgttcgtgaccttcatttctttaagtctgtttttcatcttttacaaacaaaagtccccattgaatttgccaccagggaaaatgggttaccctatcataggtgaaagtttagaattcctatccacaggctggaagggacatcctgaaaagttcatatttgatagaatgcgtaagtacagtagtgagttattcaagacttctattgtaggcgaatccacagttgtttgctgtggggcagctagtaacaaattcctattctctaacgaaaacaaactggtaactgcctggtggccagattctgttaacaaaatcttcccaacaacttcactggattctaatttgaaggaggaatctataaagatgagaaagttgctgccacagttcttcaaaccagaagcacttcaaagatacgtcggcgttatggatgtaatcgcacaaagacattttgtcactcactgggacaacaaaaatgagatcacagtttatccacttgctaaaagatacactttcttgcttgcgtgtagactgttcatgtctgttgaggatgaaaatcatgtggcgaaattctcagacccattccaactaatcgctgcaggcatcatttcacttcctatcgatcttcctggtactccattcaacaaggccataaaggcttcaaatttcattagaaaagagctgataaagattatcaaacaaagacgtgttgatctggcagagggtacagcatctccaacccaggatatcttgtcacatatgctattaacatctgatgaaaacggtaaatctatgaacgagttgaacattgccgacaagattcttggactattgataggaggccacgatacagcttcagtagcttgcacatttctagtgaagtacttaggagaattaccacatatctacgataaagtctaccaagagcaaatggaaattgccaagtccaaacctgctggggaattgttgaattgggatgacttgaaaaagatgaagtattcatggaatgtggcatgtgaggtaatgagattgtcaccacctttacaaggtggttttagagaggctataactgactttatgtttaacggtttctctattccaaaagggtggaagttatactggtccgccaactctacacacaaaaatgcagaatgtttcccaatgcctgagaaattcgatcctaccagatttgaaggtaatggtccagcgccttatacatttgtaccattcggtggaggccctagaatgtgtcctggaaaggaatacgctagattagaaatcttggttttcatgcataatctggtcaaacgttttaagtgggaaaaggttattccagacgaaaagattattgtcgatccattcccaatcccagctaaagatcttccaatccgtttgtatcctcacaaagcttaa

SEQ ID NO: 114 - protein, 479 aa, Medicago truncatula
MEPNFYLSLLLLFVTFISLSLFFIFYKQKSPLNLPPGKMGYPIIGESLEFLSTGWKGHPEKFIFDRMRKYSSELFKTSIVGESTVVCCGAASNKFLFSNENKLVTAWWPDSVNKIFPTTSLDSNLKEESIKMRKLLPQFFKPEALQRYVGVMDVIAQRHFVTHWDNKNEITVYPLAKRYTFLLACRLFMSVEDENHVAKFSDPFQLIAAGIISLPIDLPGTPFNKAIKASNFIRKELIKIIKQRRVDLAEGTASPTQDILSHMLLTSDENGKSMNELNIADKILGLLIGGHDTASVACTFLVKYLGELPHIYDKVYQEQMEIAKSKPAGELLNWDDLKKMKYSWNVACEVMRLSPPLQGGFREAITDFMFNGFSIPKGWKLYWSANSTHKNAECFPMPEKFDPTRFEGNGPAPYTFVPFGGGPRMCPGKEYARLEILVFMHNLVKRFKWEKVIPDEKIIVDPFPIPAKDLPIRLYPHKA

SEQ ID NO: 115 - DNA, 1116 bp, Artificial Sequence
  Codon-optimized GGPPS
atggcctctgttactttgggttcctggatcgtcgtccaccaccataaccatcaccatccatcatctatcctaactaaatctcgttcaagatcctgtcctattacactaaccaaaccaatctcttttcgttcaaagagaacagtttcctctagtagttctatcgtgtcctctagtgtcgtcactaaggaagacaatctgagacagtctgaaccttcttcctttgatttcatgtcatatatcattactaaggcagaactagtgaataaggctcttgattcagcagttccattaagagagccattgaaaatccatgaagcaatgagatactctcttctagctggcgggaagagagtcagacctgtactctgcatagcagcgtgcgaattagttggtggcgaggaatcaaccgctatgcctgccgcttgtgctgtagaaatgattcatacaatgtcactgatacacgatgatttgccatgtatggataacgatgatctgagaaggggtaagccaactaaccataaggttttcggcgaagatgttgccgtcttagctggtgatgctttgttatctttcgcgttcgaacatttggcatccgcaacatcaagtgatgttgtgtcaccagtaagagtagttagagcagttggagaactggctaaagctattggaactgagggtttagttgcaggtcaagtcgtcgatatctcttccgaaggtcttgatttgaatgatgtaggtcttgaacatctcgaattcatccatcttcacaagacagctgcacttttagaagccagtgcggttctcggcgcaattgttggcggagggagtgatgacgaaattgagagattgaggaagtttgctagatgtataggattactgttccaagtagtagacgatatactagatgtgacaaagtcttccaaagagttgggaaaaacagctggtaaagatttgattgccgacaaattgacctaccctaagattatggggctagaaaaatcaagagaatttgccgagaaactcaatagagaggcgcgtgatcaactgttgggtttcgattctgataaagttgcaccactcttagccttagccaactacatcgcttacagacaaaactaa

SEQ ID NO: 116 - protein, 371 aa, Arabidopsis thaliana
MASVTLGSWIVVHHHNHHHPSSILTKSRSRSCPITLTKPISFRSKRTVSSSSSIVSSSVVTKEDNLRQSEPSSFDFMSYIITKAELVNKALDSAVPLREPLKIHEAMRYSLLAGGKRVRPVLCIAACELVGGEESTAMPAACAVEMIHTMSLIHDDLPCMDNDDLRRGKPTNHKVFGEDVAVLAGDALLSFAFEHLASATSSDVVSPVRVVRAVGELAKAIGTEGLVAGQVVDISSEGLDLNDVGLEHLEFIHLHKTAALLEASAVLGAIVGGGSDDEIERLRKFARCIGLLFQVVDDILDVTKSSKELGKTAGKDLIADKLTYPKIMGLEKSREFAEKLNREARDQLLGFDSDKVAPLLALANYIAYRQN

SEQ ID NO: 117 - protein, 511 aa, Rubus suavissimus
MATLLEHFQAMPFAIPIALAALSWLFLFYIKVSFFSNKSAQAKLPPVPVVPGLPVIGNLLQLKEKKPYQTFTRWAEEYGPIYSIRTGASTMVVLNTTQVAKEAMVTRYLSISTRKLSNALKILTADKCMVAISDYNDFHKMIKRYILSNVLGPSAQKRHRSNRDTLRANVCSRLHSQVKNSPREAVNFRRVFEWELFGIALKQAFGKDIEKPIYVEELGTTLSRDEIFKVLVLDIMEGAIEVDWRDFFPYLRWIPNTRMETKIQRLYFRRKAVMTALINEQKKRIASGEEINCYIDFLLKEGKTLTMDQISMLLWETVIETADTTMVTTEWAMYEVAKDSKRQDRLYQEIQKVCGSEMVTEEYLSQLPYLNAVFHETLRKHSPAALVPLRYAHEDTQLGGYYIPAGTEIAINIYGCNMDKHQWESPEEWKPERFLDPKFDPMDLYKTMAFGAGKRVCAGSLQAMLIACPTIGRLVQEFEWKLRDGEEENVDTVGLTTHKRYPMHAILKPRS

SEQ ID NO: 118 - protein, 460 aa, Artificial Sequence
  UGT74G1 Var_1
MAEQQKIKKSPHVLLIPFPLQGHINPFIQFGKRLISKGVKTTLVTTIHTLNSTLNHSNTTTTSIEIQAISDGCDEGGFMSAGESYLETFKQVGSKSLADLIKKLQSEGTTIDAIIYDSMTEWVLDVAIEFGIDGGSFFTQACVVNSLYYHVHKGLISLPLGETVSVPGFPVLQRWETPLILQNHEQIQSPWSQMLFGQFANIDQARWVFTNSFYKLEEEVIEWTRKIWNLKVIGPTLPSMYLDKRLDDDKDNGFNLYKANHHECMNWLDDKPKESVVYVAFGSLVEHGPEQVEEITRALIDSDVNFLWVIKHKEEGKLPENLSEVIKTGKGLIVAWCKQLDVLAHESVGCFVTHCGFNSTLEAISLGVPVVAMPQFSDQTTNAKLLDEILGVGVRVKADENGIVRRGNLASCIKMIMEEERGVIIRKNAVKWKDLAKVAVHEGGSSDNDIVEFVSELIKA

SEQ ID NO: 119 - DNA, 1383 bp, Artificial Sequence
  UGT74G1 Var_2
atggctgaacaacaaaagatcaagaagtctccacacgttttgttgattccatttccattgcaaggtcacatcaacccattcattcaattcggtaagagattgatttccaagggtgttaagactactttggttactaccatccataccttgaactctaccttgaaccattctaacactaccaccacctccattgaaattcaagctatttccgatggttgtgatgaaggtggttttgtttctgctggtgaatcttacttggaaacctttaagcaagttggttctaagtccttggccgatttgattaagaagttgcaatctgaaggtactaccattgatgccattatctacgattctatgaccgaatgggttttggatgttgctattgaattcggtattgatggtggttcattcttcactcaagcttgtgttgttaactccttgtactaccatgttcacaagggtttgatctcattgccattgggtgaaactgtttctgttccaggtttcccagttttacaaagatgggaaactccattgatcttgcaaaaccacgaacaaattcaatctccatggtcccaaatgttgtttggtcaattcgccaacattgatcaagctagatgggtttttaccaactccttctacaagttggaagaagaagttatcgaatggaccagaaagatctggaacttgaaagttattggtccaaccttgccatctatgtacttggataagagattggatgacgataaggacaacggtttcaacttgtacaaggctaaccatcatgaatgcatgaattggttggacgacaagccaaaagaatccgttgtttatgttgctttcggttctttggtcaaacatggtccagaacaagttgaagaaattaccagagccttgatcgattccgatgttaatttcttgtgggtcatcaagcacaaagaagaaggtaaattgccagaaaacttgtccgaagttatcaaaactggtaagggtttgattgtcgcttggtgtaaacaattggatgttttggctcatgaatccgttggttgtttcgttactcattgtggtttcaactccaccttggaagctatttctttgggtgttccagttgttgctatgccacaattttctgatcaaactaccaacgctaagttgttggacgaaattttgggtgttggtgttagagttaaggctgacgaaaatggtatcgttagaagaggtaacttggcttcttgcatcaagatgatcatggaagaagaaagaggtgtcatcattagaaagaacgctgttaagtggaaggatttggctaaagttgctgttcatgaaggtggtagttccgataatgatatcgttgaattcgtttccgaattgatcaaggcctaa

SEQ ID NO: 120 - protein, 460 aa, Artificial Sequence
  UGT74G1 Var_2
MAEQQKIKKSPHVLLIPFPLQGHINPFIQFGKRLISKGVKTTLVTTIHTLNSTLNHSNTTTTSIEIQAISDGCDEGGFVSAGESYLETFKQVGSKSLADLIKKLQSEGTTIDAIIYDSMTEWVLDVAIEFGIDGGSFFTQACVVNSLYYHVHKGLISLPLGETVSVPGFPVLQRWETPLILQNHEQIQSPWSQMLFGQFANIDQARWVFTNSFYKLEEEVIEWTRKIWNLKVIGPTLPSMYLDKRLDDDKDNGFNLYKANHHECMNWLDDKPKESVVYVAFGSLVKHGPEQVEEITRALIDSDVNFLWVIKHKEEGKLPENLSEVIKTGKGLIVAWCKQLDVLAHESVGCFVTHCGFNSTLEAISLGVPVVAMPQFSDQTTNAKLLDEILGVGVRVKADENGIVRRGNLASCIKMIMEEERGVIIRKNAVKWKDLAKVAVHEGGSSDNDIVEFVSELIKA

SEQ ID NO: 121 - DNA, 1383 bp, Artificial Sequence
  UGT74G1 Var_3
atggctgaacaacaaaagatcaagaagtctccacacgttttgttgattccatttccattgcaaggtcacatcaacccattcattcaattcggtaagagattgatttccaagggtgttaagactactttggttactaccatccataccttgaactctaccttgaaccattctaacactaccaccacctccattgaaattcaagctatttccgatggttgtgatgaaggtggttttatgtctgctggtgaatcttacttggaaacctttaagcaagttggttctaagtccttggccgatttgattaagaagttgcaatctgaaggtactaccattgatgccattatctacgattctatgaccgaatgggttttggatgttgctattgaattcggtattgatggtggttcattcttcactcaagcttgtgttgttaactccttgtactaccatgttcacaagggtttgatctcattgccattgggtgaaactgtttctgttccaggtttcccagttttacaaagatgggaaactccattgatcttgcaaaaccacgaacaaattcaatctccatggtcccaaatgttgtttggtcaattcgccaacattgatcaagctagatgggtttttaccaactccttctacaagttggaagaagaagttatcgaatggaccagaaagatctggaacttgaaagttattggtccaaccttgccatctatgtacttggataagagattggatgacgataaggacaacggtttcaacttgtacaaggctaaccatcatgaatgcatgaattggttggacgacaagccaaaagaatccgttgtttatgttgctttcggttctttggtcaaacatggtccagaacaagttgaagaaattaccagagccttgatcgattccgatgttaatttcttgtgggtcatcaagcacaaagaagaaggtaaattgccagaaaacttgtccgaagttatcaaaactggtaagggtttgattgtcgcttggtgtaaacaattggatgttttggctcatgaatccgttggttgtttcgttactcattgtggtttcaactccaccttggaagctatttctttgggtgttccagttgttgctatgccacaatttcaagatcaaactaccaacgctaagttgttggacgaaattttgggtgttggtgttagagttaaggctgacgaaaatggtatcgttagaagaggtaacttggcttcttgcatcaagatgatcatggaagaagaaagaggtgtcatcattagaaagaacgctgttaagtggaaggatttggctaaagttgctgttcatgaaggtggtagttccgataatgatatcgttgaattcgtttccgaattgatcaaggcctaa

SEQ ID NO: 122 - protein, 460 aa, Artificial Sequence
  UGT74G1 Var_3
MAEQQKIKKSPHVLLIPFPLQGHINPFIQFGKRLISKGVKTTLVTTIHTLNSTLNHSNTTTTSIEIQAISDGCDEGGFMSAGESYLETFKQVGSKSLADLIKKLQSEGTTIDAIIYDSMTEWVLDVAIEFGIDGGSFFTQACVVNSLYYHVHKGLISLPLGETVSVPGFPVLQRWETPLILQNHEQIQSPWSQMLFGQFANIDQARWVFTNSFYKLEEEVIEWTRKIWNLKVIGPTLPSMYLDKRLDDDKDNGFNLYKANHHECMNWLDDKPKESVVYVAFGSLVKHGPEQVEEITRALIDSDVNFLWVIKHKEEGKLPENLSEVIKTGKGLIVAWCKQLDVLAHESVGCFVTHCGFNSTLEAISLGVPVVAMPQFQDQTTNAKLLDEILGVGVRVKADENGIVRRGNLASCIKMIMEEERGVIIRKNAVKWKDLAKVAVHEGGSSDNDIVEFVSELIKA

SEQ ID NO: 123 - DNA, 1383 bp, Artificial Sequence
  UGT74G1 Var_4
atggctgaacaacaaaagatcaagaagtctccacacgttttgttgattccatttccattgcaaggtcacatcaacccattcattcaattcggtaagagattgatttccaagggtgttaagactactttggttactaccatccataccttgaactctaccttgaaccattctaacactaccaccacctccattgaaattcaagctatttccgatggttgtgatgaaggtggttttatgtgtgctggtgaatcttacttggaaacctttaagcaagttggttctaagtccttggccgatttgattaagaagttgcaatctgaaggtactaccattgatgccattatctacgattctatgaccgaatgggttttggatgttgctattgaattcggtattgatggtggttcattcttcactcaagcttgtgttgttaactccttgtactaccatgttcacaagggtttgatctcattgccattgggtgaaactgtttctgttccaggtttcccagttttacaaagatgggaaactccattgatcttgcaaaaccacgaacaaattcaatctccatggtcccaaatgttgtttggtcaattcgccaacattgatcaagctagatgggtttttaccaactccttctacaagttggaagaagaagttatcgaatggaccagaaagatctggaacttgaaagttattggtccaaccttgccatctatgtacttggataagagattggatgacgataaggacaacggtttcaacttgtacaaggctaaccatcatgaatgcatgaattggttggacgacaagccaaaagaatccgttgtttatgttgctttcggttctttggtcaaacatggtccagaacaagttgaagaaattaccagagccttgatcgattccgatgttaatttcttgtgggtcatcaagcacaaagaagaaggtaaattgccagaaaacttgtccgaagttatcaaaactggtaagggtttgattgtcgcttggtgtaaacaattggatgttttggctcatgaatccgttggttgtttcgttactcattgtggtttcaactccaccttggaagctatttctttgggtgttccagttgttgctatgccacaattttctgatcaaactaccaacgctaagttgttggacgaaattttgggtgttggtgttagagttaaggctgacgaaaatggtatcgttagaagaggtaacttggcttcttgcatcaagatgatcatggaagaagaaagaggtgtcatcattagaaagaacgctgttaagtggaaggatttggctaaagttgctgttcatgaaggtggtagttccgataatgatatcgttgaattcgtttccgaattgatcaaggcctaa

SEQ ID NO: 124 - protein, 460 aa, Artificial Sequence
  UGT74G1 Var_4
MAEQQKIKKSPHVLLIPFPLQGHINPFIQFGKRLISKGVKTTLVTTIHTLNSTLNHSNTTTTSIEIQAISDGCDEGGFMCAGESYLETFKQVGSKSLADLIKKLQSEGTTIDAIIYDSMTEWVLDVAIEFGIDGGSFFTQACVVNSLYYHVHKGLISLPLGETVSVPGFPVLQRWETPLILQNHEQIQSPWSQMLFGQFANIDQARWVFTNSFYKLEEEVIEWTRKIWNLKVIGPTLPSMYLDKRLDDDKDNGFNLYKANHHECMNWLDDKPKESVVYVAFGSLVKHGPEQVEEITRALIDSDVNFLWVIKHKEEGKLPENLSEVIKTGKGLIVAWCKQLDVLAHESVGCFVTHCGFNSTLEAISLGVPVVAMPQFSDQTTNAKLLDEILGVGVRVKADENGIVRRGNLASCIKMIMEEERGVIIRKNAVKWKDLAKVAVHEGGSSDNDIVEFVSELIKA

SEQ ID NO: 125 - DNA, 1383 bp, Artificial Sequence
  UGT74G1 Var_5
atggctgaacaacaaaagatcaagaagtctccacacgttttgttgattccatttccattgcaaggtcacatcaacccattcattcaattcggtaagagattgatttccaagggtgttaagactactttggttactaccatccataccttgaactctaccttgaaccattctaacactaccaccacctccattgaaattcaagctatttccgatggttgtgatgaaggtggttttatgtctgctggtgaatcttacttggaaacctttaagcaagttggttctaagtccttggccgatttgattaagaagttgcaatctgaaggtactaccattgatgccattatctacgattctatgaccgaatgggttttggatgttgctattgaattcggtattgatggtggttcattcttcactcaagcttgtgttgttaactccttgtactaccatgttcacaagggtttgatctcattgccattgggtgaaactgtttctgttccaggtttcccagttttacaaagatgggaaactccattgatcttgcaaaaccacgaacaaattcaatctccatggtcccaaatgttgtttggtcaattcgccaacattgatcaagctagatgggtttttaccaactccttctacaagttggaagaagaagttatcgaatggaccagaaagatctggaacttgaaagttattggtccaaccttgccatctatgtacttggataagagattggatgacgataaggacaacggtttcaacttgtacaaggctacccatcatgaatgcatgaattggttggacgacaagccaaaagaatccgttgtttatgttgctttcggttctttggtctgtcatggtccagaacaagttgaagaaattaccagagccttgatcgattccgatgttaatttcttgtgggtcatcaagcacaaagaagaaggtaaattgccagaaaacttgtccgaagttatcaaaactggtaagggtttgattgtcgcttggtgtaaacaattggatgttttggctcatgaatccgttggttgtttcgttactcattgtggtttcaactccaccttggaagctatttctttgggtgttccagttgttgctatgccacaattttctgatcaaactaccaacgctaagttgttggacgaaattttgggtgttggtgttagagttaaggctgacgaaaatggtatcgttagaagaggtaacttggcttcttgcatcaagatgatcatggaagaagaaagaggtgtcatcattagaaagaacgctgttaagtggaaggatttggctaaagttgctgttcatgaaggtggtagttccgataatgatatcgttgaattcgtttccgaattgatcaaggcctaa

SEQ ID NO: 126 - protein, 460 aa, Artificial Sequence
  UGT74G1 Var_5
MAEQQKIKKSPHVLLIPFPLQGHINPFIQFGKRLISKGVKTTLVTTIHTLNSTLNHSNTTTTSIEIQAISDGCDEGGFMSAGESYLETFKQVGSKSLADLIKKLQSEGTTIDAIIYDSMTEWVLDVAIEFGIDGGSFFTQACVVNSLYYHVHKGLISLPLGETVSVPGFPVLQRWETPLILQNHEQIQSPWSQMLFGQFANIDQARWVFTNSFYKLEEEVIEWTRKIWNLKVIGPTLPSMYLDKRLDDDKDNGFNLYKATHHECMNWLDDKPKESVVYVAFGSLVCHGPEQVEEITRALIDSDVNFLWVIKHKEEGKLPENLSEVIKTGKGLIVAWCKQLDVLAHESVGCFVTHCGFNSTLEAISLGVPVVAMPQFSDQTTNAKLLDEILGVGVRVKADENGIVRRGNLASCIKMIMEEERGVIIRKNAVKWKDLAKVAVHEGGSSDNDIVEFVSELIKA

SEQ ID NO: 127 - DNA, 1383 bp, Artificial Sequence
  UGT74G1 Var_6
atggctgaacaacaaaagatcaagaagtctccacacgttttgttgattccatttccattgcaaggtcacatcaacccattcattcaattcggtaagagattgatttccaagggtgttaagactactttggttactaccatccataccttgaactctaccttgaaccattctaacactaccaccacctccattgaaattcaagctatttccgatggttgtgatgaaggtggttttatgtctgctggtgaatcttacttggaaacctttaagcaagttggttctaagtccttggccgatttgattaagaagttgcaatctgaaggtactaccattgatgccattatctacgattctatgaccgaatgggttttggatgttgctattgaattcggtattgatggtggttcattcttcactcaagcttgtgttgttaactccttgtactaccatgttcacaagggtttgatctcattgccattgggtgaaactgtttctgttccaggtttcccagttttacaaagatgggaaactccattgatcttgcaaaacgttgaacaaattcaatctccatggtcccaaatgttgtttggtcaattcgccaacattgatcaagctagatgggtttttaccaactccttctacaagttggaagaagaagttatcgaatggaccagaaagatctggaacttgaaagttattggtccaaccttgccatctatgtacttggataagagattggatgacgataaggacaacggtttcaacttgtacaaggctaaccatcatgaatgcatgaattggttggacgacaagccaaaagaatccgttgtttatgttgctttcggttctttggtcaaacatggtccagaacaagttgaagaaattaccagagccttgatcgattccgatgttaatttcttgtgggtcatcaagcacaaagaagaaggtaaattgccagaaaacttgtccgaagttatcaaaactggtaagggtttgattgtcgcttggtgtaaacaattggatgttttggctcatgaatccgttggttgtttcgttactcattgtggtttcaactccaccttggaagctatttctttgggtgttccagttgttgctatgccacaattttctgatcaaactaccaacgctaagttgttggacgaaattttgggtgttggtgttagagttaaggctgacgaaaatggtatcgttagaagaggtaacttggcttcttgcatcaagatgatcatggaagaagaaagaggtgtcatcattagaaagaacgctgttaagtggaaggatttggctaaagttgctgttcatgaaggtggtagttccgataatgatatcgttgaattcgtttccgaattgatcaaggcctaa

SEQ ID NO: 128 - protein, 460 aa, Artificial Sequence
  UGT74G1 Var_6
MAEQQKIKKSPHVLLIPFPLQGHINPFIQFGKRLISKGVKTTLVTTIHTLNSTLNHSNTTTTSIEIQAISDGCDEGGFMSAGESYLETFKQVGSKSLADLIKKLQSEGTTIDAIIYDSMTEWVLDVAIEFGIDGGSFFTQACVVNSLYYHVHKGLISLPLGETVSVPGFPVLQRWETPLILQNVEQIQSPWSQMLFGQFANIDQARWVFTNSFYKLEEEVIEWTRKIWNLKVIGPTLPSMYLDKRLDDDKDNGFNLYKANHHECMNWLDDKPKESVVYVAFGSLVKHGPEQVEEITRALIDSDVNFLWVIKHKEEGKLPENLSEVIKTGKGLIVAWCKQLDVLAHESVGCFVTHCGFNSTLEAISLGVPVVAMPQFSDQTTNAKLLDEILGVGVRVKADENGIVRRGNLASCIKMIMEEERGVIIRKNAVKWKDLAKVAVHEGGSSDNDIVEFVSELIKA

SEQ ID NO: 129 - DNA, 1383 bp, Artificial Sequence
  UGT74G1 Var_7
atggctgaacaacaaaagatcaagaagtctccacacgttttgttgattccatttccattgcaaggtcacatcaacccattcattcaattcggtaagagattgatttccaagggtgttaagactactttggttactaccatccataccttgaactctaccttgaaccattctaacactaccaccacctccattgaaattcaagctatttccgatggttgtgatgaaggtggttttatgtcttggggtaaatcttacttggaaacctttaagcaagttggttctaagtccttggccgatttgattaagaagttgcaatctgaaggtactaccattgatgccattatctacgattctatgaccgaatgggttttggatgttgctattgaattcggtattgatggtggttcattcttcactcaagcttgtgttgttaactccttgtactaccatgttcacaagggtttgatctcattgccattgggtgaaactgtttctgttccaggtttcccagttttacaaagatgggaaactccattgatcttgcaaaaccacgaacaaattcaatctccatggtcccaaatgttgtttggtcaattcgccaacattgatcaagctagatgggtttttaccaactccttctacaagttggaagaagaagttatcgaatggaccagaaagatctggaacttgaaagttattggtccaaccttgccatctatgtacttggataagagattggatgacgataaggacaacggtttcaacttgtacaaggctaaccatcatgaatgcatgaattggttggacgacaagccaaaagaatccgttgtttatgttgctttcggttctttggtcaaacatggtccagaacaagttgaagaaattaccagagccttgatcgattccgatgttaatttcttgtgggtcatcaagcacaaagaagaaggtaaattgccagaaaacttgtccgaagttatcaaaactggtaagggtttgattgtcgcttggtgtaaacaattggatgttttggctcatgaatccgttggttgtttcgttactcattgtggtttcaactccaccttggaagctatttctttgggtgttccagttgttgctatgccacaattttctgatcaaactaccaacgctaagttgttggacgaaattttgggtgttggtgttagagttaaggctgacgaaaatggtatcgttagaagaggtaacttggcttcttgcatcaagatgatcatggaagaagaaagaggtgtcatcattagaaagaacgctgttaagtggaaggatttggctaaagttgctgttcatgaaggtggtagttccgataatgatatcgttgaattcgtttccgaattgatcaaggcctaa

SEQ ID NO: 130 - protein, 460 aa, Artificial Sequence
  UGT74G1 Var_7
MAEQQKIKKSPHVLLIPFPLQGHINPFIQFGKRLISKGVKTTLVTTIHTLNSTLNHSNTTTTSIEIQAISDGCDEGGFMSWGKSYLETFKQVGSKSLADLIKKLQSEGTTIDAIIYDSMTEWVLDVAIEFGIDGGSFFTQACVVNSLYYHVHKGLISLPLGETVSVPGFPVLQRWETPLILQNHEQIQSPWSQMLFGQFANIDQARWVFTNSFYKLEEEVIEWTRKIWNLKVIGPTLPSMYLDKRLDDDKDNGFNLYKANHHECMNWLDDKPKESVVYVAFGSLVKHGPEQVEEITRALIDSDVNFLWVIKHKEEGKLPENLSEVIKTGKGLIVAWCKQLDVLAHESVGCFVTHCGFNSTLEAISLGVPVVAMPQFSDQTTNAKLLDEILGVGVRVKADENGIVRRGNLASCIKMIMEEERGVIIRKNAVKWKDLAKVAVHEGGSSDNDIVEFVSELIKA

SEQ ID NO: 131 - DNA, 2853 bp, Artificial Sequence
  Chim_1
atggatgctatggctaccaccgaaaaaaagccacatgttattttcattccattcccagctcaatcccatattaaggctatgttgaagttggcccaattattgcatcacaagggtttacaaatcaccttcgttaacaccgacttcatccacaatcaattcttggaatcttctggtccacattgcttggatggtgctccaggttttagatttgaaactattccagatggtgtttcccattctccagaagcttctattccaattagagaatccttgttgagatccatcgaaactaatttcttggacagattcatcgacttggttactaagttgccagatccaccaacctgtattatttctgatggtttcttgtccgttttcaccattgatgctgctaagaaattgggtatcccagttatgatgtactggactttggctgcttgtggttttatgggtttctaccatatccattccttgatcgaaaagggttttgctccattgaaagatgcctcttacttgactaacggttacttggataccgttattgattgggttccaggtatggaaggtatcagattgaaggattttccattggattggtccactgatttgaacgataaggttttgatgttcactaccgaagctccacaaagatctcataaggtttcccatcatatcttccacaccttcgatgaattggaaccatccattattaagaccttgtccttgagatacaaccacatctataccattggtccattgcaattattattggaccaaatcccagaagaaaagaagcaaactggtattacttccttgcacggttactcattggtcaaagaagaaccagaatgcttccaatggttgcaatctaaagaacctaactccgttgtctacgttaactttggttctactaccgttatgtccttggaagatatgactgaatttggttggggtttggctaactctaaccattacttcttgtggatcatcagatccaacttggttattggtgaaaacgctgttttgccaccagaattggaagaacatatcaagaagagaggtttcattgcttcttggtgttcccaagaaaaggttttgaaacatccatctgtcggtggtttcttgactcattgtggttggggttctaccattgaatctttgtctgctggtgttccaatgatttgttggccatattcttgggatcaattgaccaactgcagatacatctgcaaagaatgggaagtcggtttggaaatgggtacaaaagtcaaaagagatgaagtcaagagattggtccaagaattgatgggtgaaggtggtcataagatgagaaacaaagccaaggactggaaagaaaaggctagaattgctattgctccaaacggttcttcctctttgaacattgacaagatggtcaaagaaatcaccgttttggccagaaacagagcctcctccaccaaactagtaaaaatggctgaacaacaaaagatcaagaagtctccacacgttttgttgattccatttccattgcaaggtcacatcaacccattcattcaattcggtaagagattgatttccaagggtgttaagactactttggttactaccatccataccttgaactctaccttgaaccattctaacactaccaccacctccattgaaattcaagctatttccgatggttgtgatgaaggtggttttatgtctgctggtgaatcttacttggaaacctttaagcaagttggttctaagtccttggccgatttgattaagaagttgcaatctgaaggtactaccattgatgccattatctacgattctatgaccgaatgggttttggatgttgctattgaattcggtattgatggtggttcattcttcactcaagcttgtgttgttaactccttgtactaccatgttcacaagggtttgatctcattgccattgggtgaaactgtttctgttccaggtttcccagttttacaaagatgggaaactccattgatcttgcaaaaccacgaacaaattcaatctccatggtcccaaatgttgtttggtcaattcgccaacattgatcaagctagatgggtttttaccaactccttctacaagttggaagaagaagttatcgaatggaccagaaagatctggaacttgaaagttattggtccaaccttgccatctatgtacttggataagagattggatgacgataaggacaacggtttcaacttgtacaaggctaaccatcatgaatgcatgaattggttggacgacaagccaaaagaatccgttgtttatgttgctttcggttctttggtcaaacatggtccagaacaagttgaagaaattaccagagccttgatcgattccgatgttaatttcttgtgggtcatcaagcacaaagaagaaggtaaattgccagaaaacttgtccgaagttatcaaaactggtaagggtttgattgtcgcttggtgtaaacaattggatgttttggctcatgaatccgttggttgtttcgttactcattgtggtttcaactccaccttggaagctatttctttgggtgttccagttgttgctatgccacaattttctgatcaaactaccaacgctaagttgttggacgaaattttgggtgttggtgttagagttaaggctgacgaaaatggtatcgttagaagaggtaacttggcttcttgcatcaagatgatcatggaagaagaaagaggtgtcatcattagaaagaacgctgttaagtggaaggatttggctaaagttgctgttcatgaaggtggtagttccgataatgatatcgttgaattcgtttccgaattgatcaaggcctaa

SEQ ID NO: 132 - protein, 950 aa, Artificial Sequence
  Chim_1
MDAMATTEKKPHVIFIPFPAQSHIKAMLKLAQLLHHKGLQITFVNTDFIHNQFLESSGPHCLDGAPGFRFETIPDGVSHSPEASIPIRESLLRSIETNFLDRFIDLVTKLPDPPTCIISDGFLSVFTIDAAKKLGIPVMMYWTLAACGFMGFYHIHSLIEKGFAPLKDASYLTNGYLDTVIDWVPGMEGIRLKDFPLDWSTDLNDKVLMFTTEAPQRSHKVSHHIFHTFDELEPSIIKTLSLRYNHIYTIGPLQLLLDQIPEEKKQTGITSLHGYSLVKEEPECFQWLQSKEPNSVVYVNFGSTTVMSLEDMTEFGWGLANSNHYFLWIIRSNLVIGENAVLPPELEEHIKKRGFIASWCSQEKVLKHPSVGGFLTHCGWGSTIESLSAGVPMICWPYSWDQLTNCRYICKEWEVGLEMGTKVKRDEVKRLVQELMGEGGHKMRNKAKDWKEKARIAIAPNGSSSLNIDKMVKEITVLARNRASSTKLVKMAEQQKIKKSPHVLLIPFPLQGHINPFIQFGKRLISKGVKTTLVTTIHTLNSTLNHSNTTTTSIEIQAISDGCDEGGFMSAGESYLETFKQVGSKSLADLIKKLQSEGTTIDAIIYDSMTEWVLDVAIEFGIDGGSFFTQACVVNSLYYHVHKGLISLPLGETVSVPGFPVLQRWETPLILQNHEQIQSPWSQMLFGQFANIDQARWVFTNSFYKLEEEVIEWTRKIWNLKVIGPTLPSMYLDKRLDDDKDNGFNLYKANHHECMNWLDDKPKESVVYVAFGSLVKHGPEQVEEITRALIDSDVNFLWVIKHKEEGKLPENLSEVIKTGKGLIVAWCKQLDVLAHESVGCFVTHCGFNSTLEAISLGVPVVAMPQFSDQTTNAKLLDEILGVGVRVKADENGIVRRGNLASCIKMIMEEERGVIIRKNAVKWKDLAKVAVHEGGSSDNDIVEFVSELIKA

SEQ ID NO: 133 - DNA, 2874 bp, Artificial Sequence
  Chim_2
atggctgaacaacaaaagatcaagaagtctccacacgttttgttgattccatttccattgcaaggtcacatcaacccattcattcaattcggtaagagattgatttccaagggtgttaagactactttggttactaccatccataccttgaactctaccttgaaccattctaacactaccaccacctccattgaaattcaagctatttccgatggttgtgatgaaggtggttttatgtctgctggtgaatcttacttggaaacctttaagcaagttggttctaagtccttggccgatttgattaagaagttgcaatctgaaggtactaccattgatgccattatctacgattctatgaccgaatgggttttggatgttgctattgaattcggtattgatggtggttcattcttcactcaagcttgtgttgttaactccttgtactaccatgttcacaagggtttgatctcattgccattgggtgaaactgtttctgttccaggtttcccagttttacaaagatgggaaactccattgatcttgcaaaaccacgaacaaattcaatctccatggtcccaaatgttgtttggtcaattcgccaacattgatcaagctagatgggtttttaccaactccttctacaagttggaagaagaagttatcgaatggaccagaaagatctggaacttgaaagttattggtccaaccttgccatctatgtacttggataagagattggatgacgataaggacaacggtttcaacttgtacaaggctaaccatcatgaatgcatgaattggttggacgacaagccaaaagaatccgttgtttatgttgctttcggttctttggtcaaacatggtccagaacaagttgaagaaattaccagagccttgatcgattccgatgttaatttcttgtgggtcatcaagcacaaagaagaaggtaaattgccagaaaacttgtccgaagttatcaaaactggtaagggtttgattgtcgcttggtgtaaacaattggatgttttggctcatgaatccgttggttgtttcgttactcattgtggtttcaactccaccttggaagctatttctttgggtgttccagttgttgctatgccacaattttctgatcaaactaccaacgctaagttgttggacgaaattttgggtgttggtgttagagttaaggctgacgaaaatggtatcgttagaagaggtaacttggcttcttgcatcaagatgatcatggaagaagaaagaggtgtcatcattagaaagaacgctgttaagtggaaggatttggctaaagttgctgttcatgaaggtggtagttccgataatgatatcgttgaattcgtttccgaattgatcaaggccagagcctcctccaccaaactagtaaaaatggatgctatggctaccaccgaaaaaaagccacatgttattttcattccattcccagctcaatcccatattaaggctatgttgaagttggcccaattattgcatcacaagggtttacaaatcaccttcgttaacaccgacttcatccacaatcaattcttggaatcttctggtccacattgcttggatggtgctccaggttttagatttgaaactattccagatggtgtttcccattctccagaagcttctattccaattagagaatccttgttgagatccatcgaaactaatttcttggacagattcatcgacttggttactaagttgccagatccaccaacctgtattatttctgatggtttcttgtccgttttcaccattgatgctgctaagaaattgggtatcccagttatgatgtactggactttggctgcttgtggttttatgggtttctaccatatccattccttgatcgaaaagggttttgctccattgaaagatgcctcttacttgactaacggttacttggataccgttattgattgggttccaggtatggaaggtatcagattgaaggattttccattggattggtccactgatttgaacgataaggttttgatgttcactaccgaagctccacaaagatctcataaggtttcccatcatatcttccacaccttcgatgaattggaaccatccattattaagaccttgtccttgagatacaaccacatctataccattggtccattgcaattattattggaccaaatcccagaagaaaagaagcaaactggtattacttccttgcacggttactcattggtcaaagaagaaccagaatgcttccaatggttgcaatctaaagaacctaactccgttgtctacgttaactttggttctactaccgttatgtccttggaagatatgactgaatttggttggggtttggctaactctaaccattacttcttgtggatcatcagatccaacttggttattggtgaaaacgctgttttgccaccagaattggaagaacatatcaagaagagaggtttcattgcttcttggtgttcccaagaaaaggttttgaaacatccatctgtcggtggtttcttgactcattgtggttggggttctaccattgaatctttgtctgctggtgttccaatgatttgttggccatattcttgggatcaattgaccaactgcagatacatctgcaaagaatgggaagtcggtttggaaatgggtacaaaagtcaaaagagatgaagtcaagagattggtccaagaattgatgggtgaaggtggtcataagatgagaaacaaagccaaggactggaaagaaaaggctagaattgctattgctccaaacggttcttcctctttgaacattgacaagatggtcaaagaaatcaccgttttggccagaaacgtcgacctcgagtcatgtaattag

SEQ ID NO: 134 - protein, 957 aa, Artificial Sequence
  Chim_2
MAEQQKIKKSPHVLLIPFPLQGHINPFIQFGKRLISKGVKTTLVTTIHTLNSTLNHSNTTTTSIEIQAISDGCDEGGFMSAGESYLETFKQVGSKSLADLIKKLQSEGTTIDAIIYDSMTEWVLDVAIEFGIDGGSFFTQACVVNSLYYHVHKGLISLPLGETVSVPGFPVLQRWETPLILQNHEQIQSPWSQMLFGQFANIDQARWVFTNSFYKLEEEVIEWTRKIWNLKVIGPTLPSMYLDKRLDDDKDNGFNLYKANHHECMNWLDDKPKESVVYVAFGSLVKHGPEQVEEITRALIDSDVNFLWVIKHKEEGKLPENLSEVIKTGKGLIVAWCKQLDVLAHESVGCFVTHCGFNSTLEAISLGVPVVAMPQFSDQTTNAKLLDEILGVGVRVKADENGIVRRGNLASCIKMIMEEERGVIIRKNAVKWKDLAKVAVHEGGSSDNDIVEFVSELIKARASSTKLVKMDAMATTEKKPHVIFIPFPAQSHIKAMLKLAQLLHHKGLQITFVNTDFIHNQFLESSGPHCLDGAPGFRFETIPDGVSHSPEASIPIRESLLRSIETNFLDRFIDLVTKLPDPPTCIISDGFLSVFTIDAAKKLGIPVMMYWTLAACGFMGFYHIHSLIEKGFAPLKDASYLTNGYLDTVIDWVPGMEGIRLKDFPLDWSTDLNDKVLMFTTEAPQRSHKVSHHIFHTFDELEPSIIKTLSLRYNHIYTIGPLQLLLDQIPEEKKQTGITSLHGYSLVKEEPECFQWLQSKEPNSVVYVNFGSTTVMSLEDMTEFGWGLANSNHYFLWIIRSNLVIGENAVLPPELEEHIKKRGFIASWCSQEKVLKHPSVGGFLTHCGWGSTIESLSAGVPMICWPYSWDQLTNCRYICKEWEVGLEMGTKVKRDEVKRLVQELMGEGGHKMRNKAKDWKEKARIAIAPNGSSSLNIDKMVKEITVLARNVDLESCN

SEQ ID NO: 135 - DNA, 2859 bp, Artificial Sequence
  Chim_3
atggctgaacaacaaaagatcaagaagtctccacacgttttgttgattccatttccattgcaaggtcacatcaacccattcattcaattcggtaagagattgatttccaagggtgttaagactactttggttactaccatccataccttgaactctaccttgaaccattctaacactaccaccacctccattgaaattcaagctatttccgatggttgtgatgaaggtggttttatgtctgctggtgaatcttacttggaaacctttaagcaagttggttctaagtccttggccgatttgattaagaagttgcaatctgaaggtactaccattgatgccattatctacgattctatgaccgaatgggttttggatgttgctattgaattcggtattgatggtggttcattcttcactcaagcttgtgttgttaactccttgtactaccatgttcacaagggtttgatctcattgccattgggtgaaactgtttctgttccaggtttcccagttttacaaagatgggaaactccattgatcttgcaaaaccacgaacaaattcaatctccatggtcccaaatgttgtttggtcaattcgccaacattgatcaagctagatgggtttttaccaactccttctacaagttggaagaagaagttatcgaatggaccagaaagatctggaacttgaaagttattggtccaaccttgccatctatgtacttggataagagattggatgacgataaggacaacggtttcaacttgtacaaggctaaccatcatgaatgcatgaattggttggacgacaagccaaaagaatccgttgtttatgttgctttcggttctttggtcaaacatggtccagaacaagttgaagaaattaccagagccttgatcgattccgatgttaatttcttgtgggtcatcaagcacaaagaagaaggtaaattgccagaaaacttgtccgaagttatcaaaactggtaagggtttgattgtcgcttggtgtaaacaattggatgttttggctcatgaatccgttggttgtttcgttactcattgtggtttcaactccaccttggaagctatttctttgggtgttccagttgttgctatgccacaattttctgatcaaactaccaacgctaagttgttggacgaaattttgggtgttggtgttagagttaaggctgacgaaaatggtatcgttagaagaggtaacttggcttcttgcatcaagatgatcatggaagaagaaagaggtgtcatcattagaaagaacgctgttaagtggaaggatttggctaaagttgctgttcatgaaggtggtagttccgataatgatatcgttgaattcgtttccgaattgatcaaggccaaactagtaaaaatggatgctatggctaccaccgaaaaaaagccacatgttattttcattccattcccagctcaatcccatattaaggctatgttgaagttggcccaattattgcatcacaagggtttacaaatcaccttcgttaacaccgacttcatccacaatcaattcttggaatcttctggtccacattgcttggatggtgctccaggttttagatttgaaactattccagatggtgtttcccattctccagaagcttctattccaattagagaatccttgttgagatccatcgaaactaatttcttggacagattcatcgacttggttactaagttgccagatccaccaacctgtattatttctgatggtttcttgtccgttttcaccattgatgctgctaagaaattgggtatcccagttatgatgtactggactttggctgcttgtggttttatgggtttctaccatatccattccttgatcgaaaagggttttgctccattgaaagatgcctcttacttgactaacggttacttggataccgttattgattgggttccaggtatggaaggtatcagattgaaggattttccattggattggtccactgatttgaacgataaggttttgatgttcactaccgaagctccacaaagatctcataaggtttcccatcatatcttccacaccttcgatgaattggaaccatccattattaagaccttgtccttgagatacaaccacatctataccattggtccattgcaattattattggaccaaatcccagaagaaaagaagcaaactggtattacttccttgcacggttactcattggtcaaagaagaaccagaatgcttccaatggttgcaatctaaagaacctaactccgttgtctacgttaactttggttctactaccgttatgtccttggaagatatgactgaatttggttggggtttggctaactctaaccattacttcttgtggatcatcagatccaacttggttattggtgaaaacgctgttttgccaccagaattggaagaacatatcaagaagagaggtttcattgcttcttggtgttcccaagaaaaggttttgaaacatccatctgtcggtggtttcttgactcattgtggttggggttctaccattgaatctttgtctgctggtgttccaatgatttgttggccatattcttgggatcaattgaccaactgcagatacatctgcaaagaatgggaagtcggtttggaaatgggtacaaaagtcaaaagagatgaagtcaagagattggtccaagaattgatgggtgaaggtggtcataagatgagaaacaaagccaaggactggaaagaaaaggctagaattgctattgctccaaacggttcttcctctttgaacattgacaagatggtcaaagaaatcaccgttttggccagaaacgtcgacctcgagtcatgtaattag

SEQ ID NO: 136 - protein, 952 aa, Artificial Sequence
  Chim_3
MAEQQKIKKSPHVLLIPFPLQGHINPFIQFGKRLISKGVKTTLVTTIHTLNSTLNHSNTTTTSIEIQAISDGCDEGGFMSAGESYLETFKQVGSKSLADLIKKLQSEGTTIDAIIYDSMTEWVLDVAIEFGIDGGSFFTQACVVNSLYYHVHKGLISLPLGETVSVPGFPVLQRWETPLILQNHEQIQSPWSQMLFGQFANIDQARWVFTNSFYKLEEEVIEWTRKIWNLKVIGPTLPSMYLDKRLDDDKDNGFNLYKANHHECMNWLDDKPKESVVYVAFGSLVKHGPEQVEEITRALIDSDVNFLWVIKHKEEGKLPENLSEVIKTGKGLIVAWCKQLDVLAHESVGCFVTHCGFNSTLEAISLGVPVVAMPQFSDQTTNAKLLDEILGVGVRVKADENGIVRRGNLASCIKMIMEEERGVIIRKNAVKWKDLAKVAVHEGGSSDNDIVEFVSELIKAKLVKMDAMATTEKKPHVIFIPFPAQSHIKAMLKLAQLLHHKGLQITFVNTDFIHNQFLESSGPHCLDGAPGFRFETIPDGVSHSPEASIPIRESLLRSIETNFLDRFIDLVTKLPDPPTCIISDGFLSVFTIDAAKKLGIPVMMYWTLAACGFMGFYHIHSLIEKGFAPLKDASYLTNGYLDTVIDWVPGMEGIRLKDFPLDWSTDLNDKVLMFTTEAPQRSHKVSHHIFHTFDELEPSIIKTLSLRYNHIYTIGPLQLLLDQIPEEKKQTGITSLHGYSLVKEEPECFQWLQSKEPNSVVYVNFGSTTVMSLEDMTEFGWGLANSNHYFLWIIRSNLVIGENAVLPPELEEHIKKRGFIASWCSQEKVLKHPSVGGFLTHCGWGSTIESLSAGVPMICWPYSWDQLTNCRYICKEWEVGLEMGTKVKRDEVKRLVQELMGEGGHKMRNKAKDWKEKARIAIAPNGSSSLNIDKMVKEITVLARNVDLESCN

SEQ ID NO: 137 - DNA, 2871 bp, Artificial Sequence
  Chim_4
atggatgctatggctaccaccgaaaaaaagccacatgttattttcattccattcccagctcaatcccatattaaggctatgttgaagttggcccaattattgcatcacaagggtttacaaatcaccttcgttaacaccgacttcatccacaatcaattcttggaatcttctggtccacattgcttggatggtgctccaggttttagatttgaaactattccagatggtgtttcccattctccagaagcttctattccaattagagaatccttgttgagatccatcgaaactaatttcttggacagattcatcgacttggttactaagttgccagatccaccaacctgtattatttctgatggtttcttgtccgttttcaccattgatgctgctaagaaattgggtatcccagttatgatgtactggactttggctgcttgtggttttatgggtttctaccatatccattccttgatcgaaaagggttttgctccattgaaagatgcctcttacttgactaacggttacttggataccgttattgattgggttccaggtatggaaggtatcagattgaaggattttccattggattggtccactgatttgaacgataaggttttgatgttcactaccgaagctccacaaagatctcataaggtttcccatcatatcttccacaccttcgatgaattggaaccatccattattaagaccttgtccttgagatacaaccacatctataccattggtccattgcaattattattggaccaaatcccagaagaaaagaagcaaactggtattacttccttgcacggttactcattggtcaaagaagaaccagaatgcttccaatggttgcaatctaaagaacctaactccgttgtctacgttaactttggttctactaccgttatgtccttggaagatatgactgaatttggttggggtttggctaactctaaccattacttcttgtggatcatcagatccaacttggttattggtgaaaacgctgttttgccaccagaattggaagaacatatcaagaagagaggtttcattgcttcttggtgttcccaagaaaaggttttgaaacatccatctgtcggtggtttcttgactcattgtggttggggttctaccattgaatctttgtctgctggtgttccaatgatttgttggccatattcttgggatcaattgaccaactgcagatacatctgcaaagaatgggaagtcggtttggaaatgggtacaaaagtcaaaagagatgaagtcaagagattggtccaagaattgatgggtgaaggtggtcataagatgagaaacaaagccaaggactggaaagaaaaggctagaattgctattgctccaaacggttcttcctctttgaacattgacaagatggtcaaagaaatcaccgttttggccagaaacggtggaggaggctctggtggaggcggtagcggaggcggagggtcgatggctgaacaacaaaagatcaagaagtctccacacgttttgttgattccatttccattgcaaggtcacatcaacccattcattcaattcggtaagagattgatttccaagggtgttaagactactttggttactaccatccataccttgaactctaccttgaaccattctaacactaccaccacctccattgaaattcaagctatttccgatggttgtgatgaaggtggttttatgtctgctggtgaatcttacttggaaacctttaagcaagttggttctaagtccttggccgatttgattaagaagttgcaatctgaaggtactaccattgatgccattatctacgattctatgaccgaatgggttttggatgttgctattgaattcggtattgatggtggttcattcttcactcaagcttgtgttgttaactccttgtactaccatgttcacaagggtttgatctcattgccattgggtgaaactgtttctgttccaggtttcccagttttacaaagatgggaaactccattgatcttgcaaaaccacgaacaaattcaatctccatggtcccaaatgttgtttggtcaattcgccaacattgatcaagctagatgggtttttaccaactccttctacaagttggaagaagaagttatcgaatggaccagaaagatctggaacttgaaagttattggtccaaccttgccatctatgtacttggataagagattggatgacgataaggacaacggtttcaacttgtacaaggctaaccatcatgaatgcatgaattggttggacgacaagccaaaagaatccgttgtttatgttgctttcggttctttggtcaaacatggtccagaacaagttgaagaaattaccagagccttgatcgattccgatgttaatttcttgtgggtcatcaagcacaaagaagaaggtaaattgccagaaaacttgtccgaagttatcaaaactggtaagggtttgattgtcgcttggtgtaaacaattggatgttttggctcatgaatccgttggttgtttcgttactcattgtggtttcaactccaccttggaagctatttctttgggtgttccagttgttgctatgccacaattttctgatcaaactaccaacgctaagttgttggacgaaattttgggtgttggtgttagagttaaggctgacgaaaatggtatcgttagaagaggtaacttggcttcttgcatcaagatgatcatggaagaagaaagaggtgtcatcattagaaagaacgctgttaagtggaaggatttggctaaagttgctgttcatgaaggtggtagttccgataatgatatcgttgaattcgtttccgaattgatcaaggcctaa

SEQ ID NO: 138 - protein, 956 aa, Artificial Sequence
  Chim_4
MDAMATTEKKPHVIFIPFPAQSHIKAMLKLAQLLHHKGLQITFVNTDFIHNQFLESSGPHCLDGAPGFRFETIPDGVSHSPEASIPIRESLLRSIETNFLDRFIDLVTKLPDPPTCIISDGFLSVFTIDAAKKLGIPVMMYWTLAACGFMGFYHIHSLIEKGFAPLKDASYLTNGYLDTVIDWVPGMEGIRLKDFPLDWSTDLNDKVLMFTTEAPQRSHKVSHHIFHTFDELEPSIIKTLSLRYNHIYTIGPLQLLLDQIPEEKKQTGITSLHGYSLVKEEPECFQWLQSKEPNSVVYVNFGSTTVMSLEDMTEFGWGLANSNHYFLWIIRSNLVIGENAVLPPELEEHIKKRGFIASWCSQEKVLKHPSVGGFLTHCGWGSTIESLSAGVPMICWPYSWDQLTNCRYICKEWEVGLEMGTKVKRDEVKRLVQELMGEGGHKMRNKAKDWKEKARIAIAPNGSSSLNIDKMVKEITVLARNGGGGSGGGGSGGGGSMAEQQKIKKSPHVLLIPFPLQGHINPFIQFGKRLISKGVKTTLVTTIHTLNSTLNHSNTTTTSIEIQAISDGCDEGGFMSAGESYLETFKQVGSKSLADLIKKLQSEGTTIDAIIYDSMTEWVLDVAIEFGIDGGSFFTQACVVNSLYYHVHKGLISLPLGETVSVPGFPVLQRWETPLILQNHEQIQSPWSQMLFGQFANIDQARWVFTNSFYKLEEEVIEWTRKIWNLKVIGPTLPSMYLDKRLDDDKDNGFNLYKANHHECMNWLDDKPKESVVYVAFGSLVKHGPEQVEEITRALIDSDVNFLWVIKHKEEGKLPENLSEVIKTGKGLIVAWCKQLDVLAHESVGCFVTHCGFNSTLEAISLGVPVVAMPQFSDQTTNAKLLDEILGVGVRVKADENGIVRRGNLASCIKMIMEEERGVIIRKNAVKWKDLAKVAVHEGGSSDNDIVEFVSELIKA

SEQ ID NO: 139 - DNA, 2841 bp, Artificial Sequence
  Chim_5
atggatgctatggctaccaccgaaaaaaagccacatgttattttcattccattcccagctcaatcccatattaaggctatgttgaagttggcccaattattgcatcacaagggtttacaaatcaccttcgttaacaccgacttcatccacaatcaattcttggaatcttctggtccacattgcttggatggtgctccaggttttagatttgaaactattccagatggtgtttcccattctccagaagcttctattccaattagagaatccttgttgagatccatcgaaactaatttcttggacagattcatcgacttggttactaagttgccagatccaccaacctgtattatttctgatggtttcttgtccgttttcaccattgatgctgctaagaaattgggtatcccagttatgatgtactggactttggctgcttgtggttttatgggtttctaccatatccattccttgatcgaaaagggttttgctccattgaaagatgcctcttacttgactaacggttacttggataccgttattgattgggttccaggtatggaaggtatcagattgaaggattttccattggattggtccactgatttgaacgataaggttttgatgttcactaccgaagctccacaaagatctcataaggtttcccatcatatcttccacaccttcgatgaattggaaccatccattattaagaccttgtccttgagatacaaccacatctataccattggtccattgcaattattattggaccaaatcccagaagaaaagaagcaaactggtattacttccttgcacggttactcattggtcaaagaagaaccagaatgcttccaatggttgcaatctaaagaacctaactccgttgtctacgttaactttggttctactaccgttatgtccttggaagatatgactgaatttggttggggtttggctaactctaaccattacttcttgtggatcatcagatccaacttggttattggtgaaaacgctgttttgccaccagaattggaagaacatatcaagaagagaggtttcattgcttcttggtgttcccaagaaaaggttttgaaacatccatctgtcggtggtttcttgactcattgtggttggggttctaccattgaatctttgtctgctggtgttccaatgatttgttggccatattcttgggatcaattgaccaactgcagatacatctgcaaagaatgggaagtcggtttggaaatgggtacaaaagtcaaaagagatgaagtcaagagattggtccaagaattgatgggtgaaggtggtcataagatgagaaacaaagccaaggactggaaagaaaaggctagaattgctattgctccaaacggttcttcctctttgaacattgacaagatggtcaaagaaatcaccgttttggccagaaacggtggaggaggctctatggctgaacaacaaaagatcaagaagtctccacacgttttgttgattccatttccattgcaaggtcacatcaacccattcattcaattcggtaagagattgatttccaagggtgttaagactactttggttactaccatccataccttgaactctaccttgaaccattctaacactaccaccacctccattgaaattcaagctatttccgatggttgtgatgaaggtggttttatgtctgctggtgaatcttacttggaaacctttaagcaagttggttctaagtccttggccgatttgattaagaagttgcaatctgaaggtactaccattgatgccattatctacgattctatgaccgaatgggttttggatgttgctattgaattcggtattgatggtggttcattcttcactcaagcttgtgttgttaactccttgtactaccatgttcacaagggtttgatctcattgccattgggtgaaactgtttctgttccaggtttcccagttttacaaagatgggaaactccattgatcttgcaaaaccacgaacaaattcaatctccatggtcccaaatgttgtttggtcaattcgccaacattgatcaagctagatgggtttttaccaactccttctacaagttggaagaagaagttatcgaatggaccagaaagatctggaacttgaaagttattggtccaaccttgccatctatgtacttggataagagattggatgacgataaggacaacggtttcaacttgtacaaggctaaccatcatgaatgcatgaattggttggacgacaagccaaaagaatccgttgtttatgttgctttcggttctttggtcaaacatggtccagaacaagttgaagaaattaccagagccttgatcgattccgatgttaatttcttgtgggtcatcaagcacaaagaagaaggtaaattgccagaaaacttgtccgaagttatcaaaactggtaagggtttgattgtcgcttggtgtaaacaattggatgttttggctcatgaatccgttggttgtttcgttactcattgtggtttcaactccaccttggaagctatttctttgggtgttccagttgttgctatgccacaattttctgatcaaactaccaacgctaagttgttggacgaaattttgggtgttggtgttagagttaaggctgacgaaaatggtatcgttagaagaggtaacttggcttcttgcatcaagatgatcatggaagaagaaagaggtgtcatcattagaaagaacgctgttaagtggaaggatttggctaaagttgctgttcatgaaggtggtagttccgataatgatatcgttgaattcgtttccgaattgatcaaggcctaa

SEQ ID NO: 140 - protein, 946 aa, Artificial Sequence
  Chim_5
MDAMATTEKKPHVIFIPFPAQSHIKAMLKLAQLLHHKGLQITFVNTDFIHNQFLESSGPHCLDGAPGFRFETIPDGVSHSPEASIPIRESLLRSIETNFLDRFIDLVTKLPDPPTCIISDGFLSVFTIDAAKKLGIPVMMYWTLAACGFMGFYHIHSLIEKGFAPLKDASYLTNGYLDTVIDWVPGMEGIRLKDFPLDWSTDLNDKVLMFTTEAPQRSHKVSHHIFHTFDELEPSIIKTLSLRYNHIYTIGPLQLLLDQIPEEKKQTGITSLHGYSLVKEEPECFQWLQSKEPNSVVYVNFGSTTVMSLEDMTEFGWGLANSNHYFLWIIRSNLVIGENAVLPPELEEHIKKRGFIASWCSQEKVLKHPSVGGFLTHCGWGSTIESLSAGVPMICWPYSWDQLTNCRYICKEWEVGLEMGTKVKRDEVKRLVQELMGEGGHKMRNKAKDWKEKARIAIAPNGSSSLNIDKMVKEITVLARNGGGGSMAEQQKIKKSPHVLLIPFPLQGHINPFIQFGKRLISKGVKTTLVTTIHTLNSTLNHSNTTTTSIEIQAISDGCDEGGFMSAGESYLETFKQVGSKSLADLIKKLQSEGTTIDAIIYDSMTEWVLDVAIEFGIDGGSFFTQACVVNSLYYHVHKGLISLPLGETVSVPGFPVLQRWETPLILQNHEQIQSPWSQMLFGQFANIDQARWVFTNSFYKLEEEVIEWTRKIWNLKVIGPTLPSMYLDKRLDDDKDNGFNLYKANHHECMNWLDDKPKESVVYVAFGSLVKHGPEQVEEITRALIDSDVNFLWVIKHKEEGKLPENLSEVIKTGKGLIVAWCKQLDVLAHESVGCFVTHCGFNSTLEAISLGVPVVAMPQFSDQTTNAKLLDEILGVGVRVKADENGIVRRGNLASCIKMIMEEERGVIIRKNAVKWKDLAKVAVHEGGSSDNDIVEFVSELIKA

SEQ ID NO: 141 - DNA, 2826 bp, Artificial Sequence
  Chim_6
atggatgctatggctaccaccgaaaaaaagccacatgttattttcattccattcccagctcaatcccatattaaggctatgttgaagttggcccaattattgcatcacaagggtttacaaatcaccttcgttaacaccgacttcatccacaatcaattcttggaatcttctggtccacattgcttggatggtgctccaggttttagatttgaaactattccagatggtgtttcccattctccagaagcttctattccaattagagaatccttgttgagatccatcgaaactaatttcttggacagattcatcgacttggttactaagttgccagatccaccaacctgtattatttctgatggtttcttgtccgttttcaccattgatgctgctaagaaattgggtatcccagttatgatgtactggactttggctgcttgtggttttatgggtttctaccatatccattccttgatcgaaaagggttttgctccattgaaagatgcctcttacttgactaacggttacttggataccgttattgattgggttccaggtatggaaggtatcagattgaaggattttccattggattggtccactgatttgaacgataaggttttgatgttcactaccgaagctccacaaagatctcataaggtttcccatcatatcttccacaccttcgatgaattggaaccatccattattaagaccttgtccttgagatacaaccacatctataccattggtccattgcaattattattggaccaaatcccagaagaaaagaagcaaactggtattacttccttgcacggttactcattggtcaaagaagaaccagaatgcttccaatggttgcaatctaaagaacctaactccgttgtctacgttaactttggttctactaccgttatgtccttggaagatatgactgaatttggttggggtttggctaactctaaccattacttcttgtggatcatcagatccaacttggttattggtgaaaacgctgttttgccaccagaattggaagaacatatcaagaagagaggtttcattgcttcttggtgttcccaagaaaaggttttgaaacatccatctgtcggtggtttcttgactcattgtggttggggttctaccattgaatctttgtctgctggtgttccaatgatttgttggccatattcttgggatcaattgaccaactgcagatacatctgcaaagaatgggaagtcggtttggaaatgggtacaaaagtcaaaagagatgaagtcaagagattggtccaagaattgatgggtgaaggtggtcataagatgagaaacaaagccaaggactggaaagaaaaggctagaattgctattgctccaaacggttcttcctctttgaacattgacaagatggtcaaagaaatcaccgttttggccagaaacatggctgaacaacaaaagatcaagaagtctccacacgttttgttgattccatttccattgcaaggtcacatcaacccattcattcaattcggtaagagattgatttccaagggtgttaagactactttggttactaccatccataccttgaactctaccttgaaccattctaacactaccaccacctccattgaaattcaagctatttccgatggttgtgatgaaggtggttttatgtctgctggtgaatcttacttggaaacctttaagcaagttggttctaagtccttggccgatttgattaagaagttgcaatctgaaggtactaccattgatgccattatctacgattctatgaccgaatgggttttggatgttgctattgaattcggtattgatggtggttcattcttcactcaagcttgtgttgttaactccttgtactaccatgttcacaagggtttgatctcattgccattgggtgaaactgtttctgttccaggtttcccagttttacaaagatgggaaactccattgatcttgcaaaaccacgaacaaattcaatctccatggtcccaaatgttgtttggtcaattcgccaacattgatcaagctagatgggtttttaccaactccttctacaagttggaagaagaagttatcgaatggaccagaaagatctggaacttgaaagttattggtccaaccttgccatctatgtacttggataagagattggatgacgataaggacaacggtttcaacttgtacaaggctaaccatcatgaatgcatgaattggttggacgacaagccaaaagaatccgttgtttatgttgctttcggttctttggtcaaacatggtccagaacaagttgaagaaattaccagagccttgatcgattccgatgttaatttcttgtgggtcatcaagcacaaagaagaaggtaaattgccagaaaacttgtccgaagttatcaaaactggtaagggtttgattgtcgcttggtgtaaacaattggatgttttggctcatgaatccgttggttgtttcgttactcattgtggtttcaactccaccttggaagctatttctttgggtgttccagttgttgctatgccacaattttctgatcaaactaccaacgctaagttgttggacgaaattttgggtgttggtgttagagttaaggctgacgaaaatggtatcgttagaagaggtaacttggcttcttgcatcaagatgatcatggaagaagaaagaggtgtcatcattagaaagaacgctgttaagtggaaggatttggctaaagttgctgttcatgaaggtggtagttccgataatgatatcgttgaattcgtttccgaattgatcaaggcctaa

SEQ ID NO: 142 - protein, 941 aa, Artificial Sequence
  Chim_6
MDAMATTEKKPHVIFIPFPAQSHIKAMLKLAQLLHHKGLQITFVNTDFIHNQFLESSGPHCLDGAPGFRFETIPDGVSHSPEASIPIRESLLRSIETNFLDRFIDLVTKLPDPPTCIISDGFLSVFTIDAAKKLGIPVMMYWTLAACGFMGFYHIHSLIEKGFAPLKDASYLTNGYLDTVIDWVPGMEGIRLKDFPLDWSTDLNDKVLMFTTEAPQRSHKVSHHIFHTFDELEPSIIKTLSLRYNHIYTIGPLQLLLDQIPEEKKQTGITSLHGYSLVKEEPECFQWLQSKEPNSVVYVNFGSTTVMSLEDMTEFGWGLANSNHYFLWIIRSNLVIGENAVLPPELEEHIKKRGFIASWCSQEKVLKHPSVGGFLTHCGWGSTIESLSAGVPMICWPYSWDQLTNCRYICKEWEVGLEMGTKVKRDEVKRLVQELMGEGGHKMRNKAKDWKEKARIAIAPNGSSSLNIDKMVKEITVLARNMAEQQKIKKSPHVLLIPFPLQGHINPFIQFGKRLISKGVKTTLVTTIHTLNSTLNHSNTTTTSIEIQAISDGCDEGGFMSAGESYLETFKQVGSKSLADLIKKLQSEGTTIDAIIYDSMTEWVLDVAIEFGIDGGSFFTQACVVNSLYYHVHKGLISLPLGETVSVPGFPVLQRWETPLILQNHEQIQSPWSQMLFGQFANIDQARWVFTNSFYKLEEEVIEWTRKIWNLKVIGPTLPSMYLDKRLDDDKDNGFNLYKANHHECMNWLDDKPKESVVYVAFGSLVKHGPEQVEEITRALIDSDVNFLWVIKHKEEGKLPENLSEVIKTGKGLIVAWCKQLDVLAHESVGCFVTHCGFNSTLEAISLGVPVVAMPQFSDQTTNAKLLDEILGVGVRVKADENGIVRRGNLASCIKMIMEEERGVIIRKNAVKWKDLAKVAVHEGGSSDNDIVEFVSELIKA

SEQ ID NO: 143 - DNA, 2871 bp, Artificial Sequence
  Chim_7
atggctgaacaacaaaagatcaagaagtctccacacgttttgttgattccatttccattgcaaggtcacatcaacccattcattcaattcggtaagagattgatttccaagggtgttaagactactttggttactaccatccataccttgaactctaccttgaaccattctaacactaccaccacctccattgaaattcaagctatttccgatggttgtgatgaaggtggttttatgtctgctggtgaatcttacttggaaacctttaagcaagttggttctaagtccttggccgatttgattaagaagttgcaatctgaaggtactaccattgatgccattatctacgattctatgaccgaatgggttttggatgttgctattgaattcggtattgatggtggttcattcttcactcaagcttgtgttgttaactccttgtactaccatgttcacaagggtttgatctcattgccattgggtgaaactgtttctgttccaggtttcccagttttacaaagatgggaaactccattgatcttgcaaaaccacgaacaaattcaatctccatggtcccaaatgttgtttggtcaattcgccaacattgatcaagctagatgggtttttaccaactccttctacaagttggaagaagaagttatcgaatggaccagaaagatctggaacttgaaagttattggtccaaccttgccatctatgtacttggataagagattggatgacgataaggacaacggtttcaacttgtacaaggctaaccatcatgaatgcatgaattggttggacgacaagccaaaagaatccgttgtttatgttgctttcggttctttggtcaaacatggtccagaacaagttgaagaaattaccagagccttgatcgattccgatgttaatttcttgtgggtcatcaagcacaaagaagaaggtaaattgccagaaaacttgtccgaagttatcaaaactggtaagggtttgattgtcgcttggtgtaaacaattggatgttttggctcatgaatccgttggttgtttcgttactcattgtggtttcaactccaccttggaagctatttctttgggtgttccagttgttgctatgccacaattttctgatcaaactaccaacgctaagttgttggacgaaattttgggtgttggtgttagagttaaggctgacgaaaatggtatcgttagaagaggtaacttggcttcttgcatcaagatgatcatggaagaagaaagaggtgtcatcattagaaagaacgctgttaagtggaaggatttggctaaagttgctgttcatgaaggtggtagttccgataatgatatcgttgaattcgtttccgaattgatcaaggccggtggaggaggctctggtggaggcggtagcggaggcggagggtcgatggatgctatggctaccaccgaaaaaaagccacatgttattttcattccattcccagctcaatcccatattaaggctatgttgaagttggcccaattattgcatcacaagggtttacaaatcaccttcgttaacaccgacttcatccacaatcaattcttggaatcttctggtccacattgcttggatggtgctccaggttttagatttgaaactattccagatggtgtttcccattctccagaagcttctattccaattagagaatccttgttgagatccatcgaaactaatttcttggacagattcatcgacttggttactaagttgccagatccaccaacctgtattatttctgatggtttcttgtccgttttcaccattgatgctgctaagaaattgggtatcccagttatgatgtactggactttggctgcttgtggttttatgggtttctaccatatccattccttgatcgaaaagggttttgctccattgaaagatgcctcttacttgactaacggttacttggataccgttattgattgggttccaggtatggaaggtatcagattgaaggattttccattggattggtccactgatttgaacgataaggttttgatgttcactaccgaagctccacaaagatctcataaggtttcccatcatatcttccacaccttcgatgaattggaaccatccattattaagaccttgtccttgagatacaaccacatctataccattggtccattgcaattattattggaccaaatcccagaagaaaagaagcaaactggtattacttccttgcacggttactcattggtcaaagaagaaccagaatgcttccaatggttgcaatctaaagaacctaactccgttgtctacgttaactttggttctactaccgttatgtccttggaagatatgactgaatttggttggggtttggctaactctaaccattacttcttgtggatcatcagatccaacttggttattggtgaaaacgctgttttgccaccagaattggaagaacatatcaagaagagaggtttcattgcttcttggtgttcccaagaaaaggttttgaaacatccatctgtcggtggtttcttgactcattgtggttggggttctaccattgaatctttgtctgctggtgttccaatgatttgttggccatattcttgggatcaattgaccaactgcagatacatctgcaaagaatgggaagtcggtttggaaatgggtacaaaagtcaaaagagatgaagtcaagagattggtccaagaattgatgggtgaaggtggtcataagatgagaaacaaagccaaggactggaaagaaaaggctagaattgctattgctccaaacggttcttcctctttgaacattgacaagatggtcaaagaaatcaccgttttggccagaaactga

SEQ ID NO: 144 - protein, 956 aa, Artificial Sequence
  Chim_7
MAEQQKIKKSPHVLLIPFPLQGHINPFIQFGKRLISKGVKTTLVTTIHTLNSTLNHSNTTTTSIEIQAISDGCDEGGFMSAGESYLETFKQVGSKSLADLIKKLQSEGTTIDAIIYDSMTEWVLDVAIEFGIDGGSFFTQACVVNSLYYHVHKGLISLPLGETVSVPGFPVLQRWETPLILQNHEQIQSPWSQMLFGQFANIDQARWVFTNSFYKLEEEVIEWTRKIWNLKVIGPTLPSMYLDKRLDDDKDNGFNLYKANHHECMNWLDDKPKESVVYVAFGSLVKHGPEQVEEITRALIDSDVNFLWVIKHKEEGKLPENLSEVIKTGKGLIVAWCKQLDVLAHESVGCFVTHCGFNSTLEAISLGVPVVAMPQFSDQTTNAKLLDEILGVGVRVKADENGIVRRGNLASCIKMIMEEERGVIIRKNAVKWKDLAKVAVHEGGSSDNDIVEFVSELIKAGGGGSGGGGSGGGGSMDAMATTEKKPHVIFIPFPAQSHIKAMLKLAQLLHHKGLQITFVNTDFIHNQFLESSGPHCLDGAPGFRFETIPDGVSHSPEASIPIRESLLRSIETNFLDRFIDLVTKLPDPPTCIISDGFLSVFTIDAAKKLGIPVMMYWTLAACGFMGFYHIHSLIEKGFAPLKDASYLTNGYLDTVIDWVPGMEGIRLKDFPLDWSTDLNDKVLMFTTEAPQRSHKVSHHIFHTFDELEPSIIKTLSLRYNHIYTIGPLQLLLDQIPEEKKQTGITSLHGYSLVKEEPECFQWLQSKEPNSVVYVNFGSTTVMSLEDMTEFGWGLANSNHYFLWIIRSNLVIGENAVLPPELEEHIKKRGFIASWCSQEKVLKHPSVGGFLTHCGWGSTIESLSAGVPMICWPYSWDQLTNCRYICKEWEVGLEMGTKVKRDEVKRLVQELMGEGGHKMRNKAKDWKEKARIAIAPNGSSSLNIDKMVKEITVLARN

SEQ ID NO: 145 - DNA, 2841 bp, Artificial Sequence
  Chim_8
atggctgaacaacaaaagatcaagaagtctccacacgttttgttgattccatttccattgcaaggtcacatcaacccattcattcaattcggtaagagattgatttccaagggtgttaagactactttggttactaccatccataccttgaactctaccttgaaccattctaacactaccaccacctccattgaaattcaagctatttccgatggttgtgatgaaggtggttttatgtctgctggtgaatcttacttggaaacctttaagcaagttggttctaagtccttggccgatttgattaagaagttgcaatctgaaggtactaccattgatgccattatctacgattctatgaccgaatgggttttggatgttgctattgaattcggtattgatggtggttcattcttcactcaagcttgtgttgttaactccttgtactaccatgttcacaagggtttgatctcattgccattgggtgaaactgtttctgttccaggtttcccagttttacaaagatgggaaactccattgatcttgcaaaaccacgaacaaattcaatctccatggtcccaaatgttgtttggtcaattcgccaacattgatcaagctagatgggtttttaccaactccttctacaagttggaagaagaagttatcgaatggaccagaaagatctggaacttgaaagttattggtccaaccttgccatctatgtacttggataagagattggatgacgataaggacaacggtttcaacttgtacaaggctaaccatcatgaatgcatgaattggttggacgacaagccaaaagaatccgttgtttatgttgctttcggttctttggtcaaacatggtccagaacaagttgaagaaattaccagagccttgatcgattccgatgttaatttcttgtgggtcatcaagcacaaagaagaaggtaaattgccagaaaacttgtccgaagttatcaaaactggtaagggtttgattgtcgcttggtgtaaacaattggatgttttggctcatgaatccgttggttgtttcgttactcattgtggtttcaactccaccttggaagctatttctttgggtgttccagttgttgctatgccacaattttctgatcaaactaccaacgctaagttgttggacgaaattttgggtgttggtgttagagttaaggctgacgaaaatggtatcgttagaagaggtaacttggcttcttgcatcaagatgatcatggaagaagaaagaggtgtcatcattagaaagaacgctgttaagtggaaggatttggctaaagttgctgttcatgaaggtggtagttccgataatgatatcgttgaattcgtttccgaattgatcaaggccggtggaggaggctctatggatgctatggctaccaccgaaaaaaagccacatgttattttcattccattcccagctcaatcccatattaaggctatgttgaagttggcccaattattgcatcacaagggtttacaaatcaccttcgttaacaccgacttcatccacaatcaattcttggaatcttctggtccacattgcttggatggtgctccaggttttagatttgaaactattccagatggtgtttcccattctccagaagcttctattccaattagagaatccttgttgagatccatcgaaactaatttcttggacagattcatcgacttggttactaagttgccagatccaccaacctgtattatttctgatggtttcttgtccgttttcaccattgatgctgctaagaaattgggtatcccagttatgatgtactggactttggctgcttgtggttttatgggtttctaccatatccattccttgatcgaaaagggttttgctccattgaaagatgcctcttacttgactaacggttacttggataccgttattgattgggttccaggtatggaaggtatcagattgaaggattttccattggattggtccactgatttgaacgataaggttttgatgttcactaccgaagctccacaaagatctcataaggtttcccatcatatcttccacaccttcgatgaattggaaccatccattattaagaccttgtccttgagatacaaccacatctataccattggtccattgcaattattattggaccaaatcccagaagaaaagaagcaaactggtattacttccttgcacggttactcattggtcaaagaagaaccagaatgcttccaatggttgcaatctaaagaacctaactccgttgtctacgttaactttggttctactaccgttatgtccttggaagatatgactgaatttggttggggtttggctaactctaaccattacttcttgtggatcatcagatccaacttggttattggtgaaaacgctgttttgccaccagaattggaagaacatatcaagaagagaggtttcattgcttcttggtgttcccaagaaaaggttttgaaacatccatctgtcggtggtttcttgactcattgtggttggggttctaccattgaatctttgtctgctggtgttccaatgatttgttggccatattcttgggatcaattgaccaactgcagatacatctgcaaagaatgggaagtcggtttggaaatgggtacaaaagtcaaaagagatgaagtcaagagattggtccaagaattgatgggtgaaggtggtcataagatgagaaacaaagccaaggactggaaagaaaaggctagaattgctattgctccaaacggttcttcctctttgaacattgacaagatggtcaaagaaatcaccgttttggccagaaactga

SEQ ID NO: 146 - protein, 946 aa, Artificial Sequence
  Chim_8
MAEQQKIKKSPHVLLIPFPLQGHINPFIQFGKRLISKGVKTTLVTTIHTLNSTLNHSNTTTTSIEIQAISDGCDEGGFMSAGESYLETFKQVGSKSLADLIKKLQSEGTTIDAIIYDSMTEWVLDVAIEFGIDGGSFFTQACVVNSLYYHVHKGLISLPLGETVSVPGFPVLQRWETPLILQNHEQIQSPWSQMLFGQFANIDQARWVFTNSFYKLEEEVIEWTRKIWNLKVIGPTLPSMYLDKRLDDDKDNGFNLYKANHHECMNWLDDKPKESVVYVAFGSLVKHGPEQVEEITRALIDSDVNFLWVIKHKEEGKLPENLSEVIKTGKGLIVAWCKQLDVLAHESVGCFVTHCGFNSTLEAISLGVPVVAMPQFSDQTTNAKLLDEILGVGVRVKADENGIVRRGNLASCIKMIMEEERGVIIRKNAVKWKDLAKVAVHEGGSSDNDIVEFVSELIKAGGGGSMDAMATTEKKPHVIFIPFPAQSHIKAMLKLAQLLHHKGLQITFVNTDFIHNQFLESSGPHCLDGAPGFRFETIPDGVSHSPEASIPIRESLLRSIETNFLDRFIDLVTKLPDPPTCIISDGFLSVFTIDAAKKLGIPVMMYWTLAACGFMGFYHIHSLIEKGFAPLKDASYLTNGYLDTVIDWVPGMEGIRLKDFPLDWSTDLNDKVLMFTTEAPQRSHKVSHHIFHTFDELEPSIIKTLSLRYNHIYTIGPLQLLLDQIPEEKKQTGITSLHGYSLVKEEPECFQWLQSKEPNSVVYVNFGSTTVMSLEDMTEFGWGLANSNHYFLWIIRSNLVIGENAVLPPELEEHIKKRGFIASWCSQEKVLKHPSVGGFLTHCGWGSTIESLSAGVPMICWPYSWDQLTNCRYICKEWEVGLEMGTKVKRDEVKRLVQELMGEGGHKMRNKAKDWKEKARIAIAPNGSSSLNIDKMVKEITVLARN

SEQ ID NO: 147 - DNA, 2826 bp, Artificial Sequence
  Chim_9
atggctgaacaacaaaagatcaagaagtctccacacgttttgttgattccatttccattgcaaggtcacatcaacccattcattcaattcggtaagagattgatttccaagggtgttaagactactttggttactaccatccataccttgaactctaccttgaaccattctaacactaccaccacctccattgaaattcaagctatttccgatggttgtgatgaaggtggttttatgtctgctggtgaatcttacttggaaacctttaagcaagttggttctaagtccttggccgatttgattaagaagttgcaatctgaaggtactaccattgatgccattatctacgattctatgaccgaatgggttttggatgttgctattgaattcggtattgatggtggttcattcttcactcaagcttgtgttgttaactccttgtactaccatgttcacaagggtttgatctcattgccattgggtgaaactgtttctgttccaggtttcccagttttacaaagatgggaaactccattgatcttgcaaaaccacgaacaaattcaatctccatggtcccaaatgttgtttggtcaattcgccaacattgatcaagctagatgggtttttaccaactccttctacaagttggaagaagaagttatcgaatggaccagaaagatctggaacttgaaagttattggtccaaccttgccatctatgtacttggataagagattggatgacgataaggacaacggtttcaacttgtacaaggctaaccatcatgaatgcatgaattggttggacgacaagccaaaagaatccgttgtttatgttgctttcggttctttggtcaaacatggtccagaacaagttgaagaaattaccagagccttgatcgattccgatgttaatttcttgtgggtcatcaagcacaaagaagaaggtaaattgccagaaaacttgtccgaagttatcaaaactggtaagggtttgattgtcgcttggtgtaaacaattggatgttttggctcatgaatccgttggttgtttcgttactcattgtggtttcaactccaccttggaagctatttctttgggtgttccagttgttgctatgccacaattttctgatcaaactaccaacgctaagttgttggacgaaattttgggtgttggtgttagagttaaggctgacgaaaatggtatcgttagaagaggtaacttggcttcttgcatcaagatgatcatggaagaagaaagaggtgtcatcattagaaagaacgctgttaagtggaaggatttggctaaagttgctgttcatgaaggtggtagttccgataatgatatcgttgaattcgtttccgaattgatcaaggccatggatgctatggctaccaccgaaaaaaagccacatgttattttcattccattcccagctcaatcccatattaaggctatgttgaagttggcccaattattgcatcacaagggtttacaaatcaccttcgttaacaccgacttcatccacaatcaattcttggaatcttctggtccacattgcttggatggtgctccaggttttagatttgaaactattccagatggtgtttcccattctccagaagcttctattccaattagagaatccttgttgagatccatcgaaactaatttcttggacagattcatcgacttggttactaagttgccagatccaccaacctgtattatttctgatggtttcttgtccgttttcaccattgatgctgctaagaaattgggtatcccagttatgatgtactggactttggctgcttgtggttttatgggtttctaccatatccattccttgatcgaaaagggttttgctccattgaaagatgcctcttacttgactaacggttacttggataccgttattgattgggttccaggtatggaaggtatcagattgaaggattttccattggattggtccactgatttgaacgataaggttttgatgttcactaccgaagctccacaaagatctcataaggtttcccatcatatcttccacaccttcgatgaattggaaccatccattattaagaccttgtccttgagatacaaccacatctataccattggtccattgcaattattattggaccaaatcccagaagaaaagaagcaaactggtattacttccttgcacggttactcattggtcaaagaagaaccagaatgcttccaatggttgcaatctaaagaacctaactccgttgtctacgttaactttggttctactaccgttatgtccttggaagatatgactgaatttggttggggtttggctaactctaaccattacttcttgtggatcatcagatccaacttggttattggtgaaaacgctgttttgccaccagaattggaagaacatatcaagaagagaggtttcattgcttcttggtgttcccaagaaaaggttttgaaacatccatctgtcggtggtttcttgactcattgtggttggggttctaccattgaatctttgtctgctggtgttccaatgatttgttggccatattcttgggatcaattgaccaactgcagatacatctgcaaagaatgggaagtcggtttggaaatgggtacaaaagtcaaaagagatgaagtcaagagattggtccaagaattgatgggtgaaggtggtcataagatgagaaacaaagccaaggactggaaagaaaaggctagaattgctattgctccaaacggttcttcctctttgaacattgacaagatggtcaaagaaatcaccgttttggccagaaactga

SEQ ID NO: 148 - protein, 941 aa, Artificial Sequence
  Chim_9
MAEQQKIKKSPHVLLIPFPLQGHINPFIQFGKRLISKGVKTTLVTTIHTLNSTLNHSNTTTTSIEIQAISDGCDEGGFMSAGESYLETFKQVGSKSLADLIKKLQSEGTTIDAIIYDSMTEWVLDVAIEFGIDGGSFFTQACVVNSLYYHVHKGLISLPLGETVSVPGFPVLQRWETPLILQNHEQIQSPWSQMLFGQFANIDQARWVFTNSFYKLEEEVIEWTRKIWNLKVIGPTLPSMYLDKRLDDDKDNGFNLYKANHHECMNWLDDKPKESVVYVAFGSLVKHGPEQVEEITRALIDSDVNFLWVIKHKEEGKLPENLSEVIKTGKGLIVAWCKQLDVLAHESVGCFVTHCGFNSTLEAISLGVPVVAMPQFSDQTTNAKLLDEILGVGVRVKADENGIVRRGNLASCIKMIMEEERGVIIRKNAVKWKDLAKVAVHEGGSSDNDIVEFVSELIKAMDAMATTEKKPHVIFIPFPAQSHIKAMLKLAQLLHHKGLQITFVNTDFIHNQFLESSGPHCLDGAPGFRFETIPDGVSHSPEASIPIRESLLRSIETNFLDRFIDLVTKLPDPPTCIISDGFLSVFTIDAAKKLGIPVMMYWTLAACGFMGFYHIHSLIEKGFAPLKDASYLTNGYLDTVIDWVPGMEGIRLKDFPLDWSTDLNDKVLMFTTEAPQRSHKVSHHIFHTFDELEPSIIKTLSLRYNHIYTIGPLQLLLDQIPEEKKQTGITSLHGYSLVKEEPECFQWLQSKEPNSVVYVNFGSTTVMSLEDMTEFGWGLANSNHYFLWIIRSNLVIGENAVLPPELEEHIKKRGFIASWCSQEKVLKHPSVGGFLTHCGWGSTIESLSAGVPMICWPYSWDQLTNCRYICKEWEVGLEMGTKVKRDEVKRLVQELMGEGGHKMRNKAKDWKEKARIAIAPNGSSSLNIDKMVKEITVLARN

SEQ ID NO: 149 - DNA, 1443 bp, Artificial Sequence
  Codon-optimized UGT85C2
atggatgctatggctaccaccgaaaaaaagccacatgttattttcattccattcccagctcaatcccatattaaggctatgttgaagttggcccaattattgcatcacaagggtttacaaatcaccttcgttaacaccgacttcatccacaatcaattcttggaatcttctggtccacattgcttggatggtgctccaggttttagatttgaaactattccagatggtgtttcccattctccagaagcttctattccaattagagaatccttgttgagatccatcgaaactaatttcttggacagattcatcgacttggttactaagttgccagatccaccaacctgtattatttctgatggtttcttgtccgttttcaccattgatgctgctaagaaattgggtatcccagttatgatgtactggactttggctgcttgtggttttatgggtttctaccatatccattccttgatcgaaaagggttttgctccattgaaagatgcctcttacttgactaacggttacttggataccgttattgattgggttccaggtatggaaggtatcagattgaaggattttccattggattggtccactgatttgaacgataaggttttgatgttcactaccgaagctccacaaagatctcataaggtttcccatcatatcttccacaccttcgatgaattggaaccatccattattaagaccttgtccttgagatacaaccacatctataccattggtccattgcaattattattggaccaaatcccagaagaaaagaagcaaactggtattacttccttgcacggttactcattggtcaaagaagaaccagaatgcttccaatggttgcaatctaaagaacctaactccgttgtctacgttaactttggttctactaccgttatgtccttggaagatatgactgaatttggttggggtttggctaactctaaccattacttcttgtggatcatcagatccaacttggttattggtgaaaacgctgttttgccaccagaattggaagaacatatcaagaagagaggtttcattgcttcttggtgttcccaagaaaaggttttgaaacatccatctgtcggtggtttcttgactcattgtggttggggttctaccattgaatctttgtctgctggtgttccaatgatttgttggccatattcttgggatcaattgaccaactgcagatacatctgcaaagaatgggaagtcggtttggaaatgggtacaaaagtcaaaagagatgaagtcaagagattggtccaagaattgatgggtgaaggtggtcataagatgagaaacaaagccaaggactggaaagaaaaggctagaattgctattgctccaaacggttcttcctctttgaacattgacaagatggtcaaagaaatcaccgttttggccagaaac

SEQ ID NO: 150 - protein, 9 aa, Artificial Sequence
  linker
RASSTKLVK

SEQ ID NO: 151 - protein, 14 aa, Artificial Sequence
  linker
EGKSSGSGSESKST

SEQ ID NO: 152 - protein, 191 aa, Escherichia coli
MKAQYEDGKQYTTLEKPVAGAPQVLEFFSFFCPHCYQFEEVLHISDNVKKKLPEGVKMTKYHVNFMGGDLGKDLTQAWAVAMALGVEDKVTVPLFEGVQKTQTIRSASDIRDVFINAGIKGEEYDAAWNSFVVKSLVAQQEKAAADVQLRGVPAMFVNGKYQLNPQGMDTSNMDVFVQQYADTVKYLSEKK

SEQ ID NO: 153 - protein, 367 aa, Escherichia coli
MKTEEGKLVIWINGDKGYNGLAEVGKKFEKDTGIKVTVEHPDKLEEKFPQVAATGDGPDIIFWAHDRFGGYAQSGLLAEITPDKAFQDKLYPFTWDAVRYNGKLIAYPIAVEALSLIYNKDLLPNPPKTWEEIPALDKELKAKGKSALMFNLQEPYFTWPLIAADGGYAFKYENGKYDIKDVGVDNAGAKAGLTFLVDLIKNKHMNADTDYSIAEAAFNKGETAMTINGPWAWSNIDTSKVNYGVTVLPTFKGQPSKPFVGVLSAGINAASPNKELAKEFLENYLLTDEGLEAVNKDKPLGAVALKSYEEELAKDPRIAATMENAQKGEIMPNIPQMSAFWYAVRTAVINAASGRQTVDEALKDAQT

SEQ ID NO: 154 - protein, 495 aa, Escherichia coli [sequence omitted]

SEQ ID NO: 155 - protein, 98 aa, Saccharomyces cerevisiae
MSDSEVNQEAKPEVKPEVKPETHINLKVSDGSSEIFFKIKKTTPLRRLMEAFAKRQGKEMDSLTFLYDGIEIQADQTPEDLDMEDNDIIEAHREQIGG

SEQ ID NO: 156 - DNA, 573 bp, Escherichia coli
atgaaagcgcaatatgaagatggaaagcagtatacgaccttagaaaaaccagtcgctggagctccgcaagtcttggaattctttagttttttttgtccgcattgttaccagtttgaggaagtcttgcatatatccgacaacgtcaaaaagaagttgccagaaggcgttaaaatgacgaaatatcacgttaactttatgggaggtgacttgggaaaagatcttactcaagcctgggccgttgcaatggcattgggagttgaagataaagttacagtgcccttgtttgaaggagttcaaaagacccagactataaggtcagcctccgacattagagacgtctttatcaatgctgggattaagggcgaagagtatgatgccgcgtggaactcctttgttgtcaagagtttagtcgcacaacaagaaaaggctgctgcagacgttcagttaaggggtgtgccagccatgttcgttaatggtaagtatcagttaaatccacaggggatggatacatcaaacatggatgtgttcgtgcaacagtacgcagacactgttaaatatttgtcagagaagaaa

SEQ ID NO: 157 - DNA, 1101 bp, Escherichia coli
atgaaaacagaagaagggaaattggttatatggataaacggtgataagggctataacggattagccgaggtaggtaagaagtttgaaaaagatactggtataaaagttactgttgaacatccggacaaactggaagaaaaatttcctcaagttgctgcaactggcgatggtccagatataatcttctgggcacatgacagattcggcggttacgcacagtccggattgctggctgagatcacccctgacaaggcgttccaagataagctatacccttttacatgggacgcagtgagatacaatggaaaattgattgcttacccaattgcagttgaggcactgtctctgatttacaataaggacttgctaccaaaccctccaaaaacctgggaagaaatcccagccctggacaaagaactaaaagctaaaggaaaatccgccttgatgtttaacttgcaagagccttatttcacatggccgctaattgctgcagatggcggttatgcttttaaatatgaaaacggtaagtatgacatcaaagatgttggagtcgacaatgcaggtgctaaggccggcttaactttcttagtggacttaatcaagaataagcatatgaatgcagacactgattacagcatagcggaggctgctttcaacaaaggtgaaacagctatgacaataaatggcccttgggcctggtctaatatcgacacgtctaaagttaattatggggtaacagtacttccaacgtttaaaggccagccatcaaagccctttgtaggtgtcctgagtgccggtattaacgcagccagcccgaacaaagagttagcgaaagaattcttagaaaattatttactgaccgatgagggtcttgaagcagtgaacaaggataaacctttgggtgcagtcgctttgaagagttacgaagaagaactggctaaggaccccagaattgcagccactatggaaaatgcccaaaagggagaaattatgccaaatatacctcaaatgtcagccttctggtatgcggttaggactgccgttataaacgctgctagtggaaggcagacggtggatgaagcacttaaagatgcgcagaca

SEQ ID NO: 158 - DNA, 1485 bp, Escherichia coli
atgaataaggagattctagcagtcgttgaagcagtaagtaacgaaaaagcattgcctagggagaaaatcttcgaagccctagaaagcgctttggccacagccacgaaaaagaagtacgagcaagaaattgacgttagagttcagatcgacaggaaatcaggtgatttcgatacatttaggagatggttagtagtagatgaggttacacagcctactaaggagattacattagaggcggccagatacgaagacgaatctttgaacttaggggactatgttgaggatcaaattgaatcagttacttttgatagaattacaactcaaacagccaaacaagtcatagttcaaaaagtgagggaagccgaaagagcaatggtggtcgaccaatttcgtgagcacgaaggagagatcataacaggtgtcgttaaaaaggttaatagagataatatttctttggatcttgggaataatgccgaagctgttatcctgagggaagatatgttgccgagggaaaatttcagacctggagatcgtgtcagaggtgttttgtattctgtacgtccagaggcaagaggagctcaattatttgttactcgttctaaaccggagatgcttattgaactatttaggattgaggtgcctgaaattggagaagaagttattgagatcaaagccgctgcacgtgatccaggatcaagagcgaagattgctgttaaaacaaatgataaacgtatcgatcccgtgggtgcgtgtgttggtatgaggggtgctagagtccaggctgtaagcaccgaactgggaggcgagaggattgacattgtcttgtgggacgataatcctgcccagtttgtaataaacgcaatggctcctgctgatgtggcctctatagtcgtggatgaggacaaacataccatggatatagcagtagaagctggtaatttagcccaagcaattggaagaaacggtcaaaacgtccgtttagcttcccagttgtctggttgggaactgaacgtgatgacggttgatgatttacaagctaagcaccaagcagaggctcatgcagcgattgataccttcactaaatatctagatatagacgaggattttgcaactgtgcttgttgaagaaggcttttctacgttagaagaactagcttacgtcccaatgaaggaattattagaaatcgagggtttggatgaacctacagtggaggctttgagagaaagggccaagaatgccctagcaactatagctcaagcacaagaggaatcactgggagataataagcctgcagacgatttgctgaacctagaaggtgtagatagggacttggcttttaagctagcagccagaggcgtgtgtacactagaggatttggctgaacaaggaatagatgacctagctgacattgaagggttgacagatgaaaaagctggggccttaataatggccgctaggaatatttgctggttcggggatgaggca

SEQ ID NO: 159 - DNA, 294 bp, Saccharomyces cerevisiae
atgagtgactctgaagtgaatcaagaggctaaaccagaagtaaagcccgaagtaaagccagagacccacatcaacttgaaggtttcagacgggtcttcagagatattctttaaaatcaaaaagacaacgcccttgagaaggctaatggaagcgtttgccaagagacaaggaaaagaaatggatagtttaactttcttgtacgatgggattgagattcaagcagatcaaactccggaagatttggacatggaagataatgatatcattgaagctcatagagaacaaatcggaggt

SEQ ID NO: 160 - DNA, 1383 bp, Artificial Sequence
  UGT74G1 Var_8
atggctgaacaacaaaagatcaagaagtctccacacgttttgttgattccatttccattgcaaggtcacatcaacccattcattcaattcggtaagagattgatttccaagggtgttaagactactttggttactaccatccataccttgaactctaccttgaaccattctaacactaccaccacctccattgaaattcaagctatttccgatggttgtgatgaaggtggttttatgtcttggggtgaatcttacttggaaacctttaagcaagttggttctaagtccttggccgatttgattaagaagttgcaatctgaaggtactaccattgatgccattatctacgattctatgaccgaatgggttttggatgttgctattgaattcggtattgatggtggttcattcttcactcaagcttgtgttgttaactccttgtactaccatgttcacaagggtttgatctcattgccattgggtgaaactgtttctgttccaggtttcccagttttacaaagatgggaaactccattgatcttgcaaaaccacgaacaaattcaatctccatggtcccaaatgttgtttggtcaattcgccaacattgatcaagctagatgggtttttaccaactccttctacaagttggaagaagaagttatcgaatggaccagaaagatctggaacttgaaagttattggtccaaccttgccatctatgtacttggataagagattggatgacgataaggacaacggtttcaacttgtacaaggctaaccatcatgaatgcatgaattggttggacgacaagccaaaagaatccgttgtttatgttgctttcggttctttggtcaaacatggtccagaacaagttgaagaaattaccagagccttgatcgattccgatgttaatttcttgtgggtcatcaagcacaaagaagaaggtaaattgccagaaaacttgtccgaagttatcaaaactggtaagggtttgattgtcgcttggtgtaaacaattggatgttttggctcatgaatccgttggttgtttcgttactcattgtggtttcaactccaccttggaagctatttctttgggtgttccagttgttgctatgccacaattttctgatcaaactaccaacgctaagttgttggacgaaattttgggtgttggtgttagagttaaggctgacgaaaatggtatcgttagaagaggtaacttggcttcttgcatcaagatgatcatggaagaagaaagaggtgtcatcattagaaagaacgctgttaagtggaaggatttggctaaagttgctgttcatgaaggtggtagttccgataatgatatcgttgaattcgtttccgaattgatcaaggcctaa

SEQ ID NO: 161 - protein, 460 aa, Artificial Sequence
  UGT74G1 Var_8
MAEQQKIKKSPHVLLIPFPLQGHINPFIQFGKRLISKGVKTTLVTTIHTLNSTLNHSNTTTTSIEIQAISDGCDEGGFMSWGESYLETFKQVGSKSLADLIKKLQSEGTTIDAIIYDSMTEWVLDVAIEFGIDGGSFFTQACVVNSLYYHVHKGLISLPLGETVSVPGFPVLQRWETPLILQNHEQIQSPWSQMLFGQFANIDQARWVFTNSFYKLEEEVIEWTRKIWNLKVIGPTLPSMYLDKRLDDDKDNGFNLYKANHHECMNWLDDKPKESVVYVAFGSLVKHGPEQVEEITRALIDSDVNFLWVIKHKEEGKLPENLSEVIKTGKGLIVAWCKQLDVLAHESVGCFVTHCGFNSTLEAISLGVPVVAMPQFSDQTTNAKLLDEILGVGVRVKADENGIVRRGNLASCIKMIMEEERGVIIRKNAVKWKDLAKVAVHEGGSSDNDIVEFVSELIKA

SEQ ID NO: 162 - DNA, 1383 bp, Artificial Sequence
  UGT74G1 Var_9
atggctgaacaacaaaagatcaagaagtctccacacgttttgttgattccatttccattgcaaggtcacatcaacccattcattcaattcggtaagagattgatttccaagggtgttaagactactttggttactaccatccataccttgaactctaccttgaaccattctaacactaccaccacctccattgaaattcaagctatttccgatggttgtgatgaaggtggttttatgtctgctggtgaatcttacttggaaacctttaagcaagttggttctaagtccttggccgatttgattaagaagttgcaatctgaaggtactaccattgatgccattatctacgattctatgaccgaatgggttttggatgttgctattgaattcggtattgatggtggttcattcttcactcaagcttgtgttgttaactccttgtactaccatgttcacaagggtttgatctcattgccattgggtgaaactgtttctgttccaggtttcccagttttacaaagatgggaaactccattgatcttgcaaaacactgaacaaattcaatctccatggtcccaaatgttgtttggtcaattcgccaacattgatcaagctagatgggtttttaccaactccttctacaagttggaagaagaagttatcgaatggaccagaaagatctggaacttgaaagttattggtccaaccttgccatctatgtacttggataagagattggatgacgataaggacaacggtttcaacttgtacaaggctaaccatcatgaatgcatgaattggttggacgacaagccaaaagaatccgttgtttatgttgctttcggttctttggtcaaacatggtccagaacaagttgaagaaattaccagagccttgatcgattccgatgttaatttcttgtgggtcatcaagcacaaagaagaaggtaaattgccagaaaacttgtccgaagttatcaaaactggtaagggtttgattgtcgcttggtgtaaacaattggatgttttggctcatgaatccgttggttgtttcgttactcattgtggtttcaactccaccttggaagctatttctttgggtgttccagttgttgctatgccacaattttctgatcaaactaccaacgctaagttgttggacgaaattttgggtgttggtgttagagttaaggctgacgaaaatggtatcgttagaagaggtaacttggcttcttgcatcaagatgatcatggaagaagaaagaggtgtcatcattagaaagaacgctgttaagtggaaggatttggctaaagttgctgttcatgaaggtggtagttccgataatgatatcgttgaattcgtttccgaattgatcaaggcctaa

SEQ ID NO: 163 - protein, 460 aa, Artificial Sequence
  UGT74G1 Var_9
MAEQQKIKKSPHVLLIPFPLQGHINPFIQFGKRLISKGVKTTLVTTIHTLNSTLNHSNTTTTSIEIQAISDGCDEGGFMSAGESYLETFKQVGSKSLADLIKKLQSEGTTIDAIIYDSMTEWVLDVAIEFGIDGGSFFTQACVVNSLYYHVHKGLISLPLGETVSVPGFPVLQRWETPLILQNTEQIQSPWSQMLFGQFANIDQARWVFTNSFYKLEEEVIEWTRKIWNLKVIGPTLPSMYLDKRLDDDKDNGFNLYKANHHECMNWLDDKPKESVVYVAFGSLVKHGPEQVEEITRALIDSDVNFLWVIKHKEEGKLPENLSEVIKTGKGLIVAWCKQLDVLAHESVGCFVTHCGFNSTLEAISLGVPVVAMPQFSDQTTNAKLLDEILGVGVRVKADENGIVRRGNLASCIKMIMEEERGVIIRKNAVKWKDLAKVAVHEGGSSDNDIVEFVSELIKA

SEQ ID NO: 164 - DNA, 1383 bp, Artificial Sequence
  UGT74G1 Var_10
atggctgaacaacaaaagatcaagaagtctccacacgttttgttgattccatttccattgcaaggtcacatcaacccattcattcaattcggtaagagattgatttccaagggtgttaagactactttggttactaccatccataccttgaactctaccttgaaccattctaacactaccaccacctccattgaaattcaagctatttccgatggttgtgatgaaggtggttttatgtctgctggtgaatcttacttggaaacctttaagcaagttggttctaagtccttggccgatttgattaagaagttgcaatctgaaggtactaccattgatgccattatctacgattctatgaccgaatgggttttggatgttgctattgaattcggtattgatggtggttcattcttcactcaagcttgtgttgttaactccttgtactaccatgttcacaagggtttgatctcattgccattgggtgaaactgtttctgttccaggtttcccagttttacaaagatgggaaactccattgatcttgcaaaaccacgaacaaattcaatctccatggtcccaaatgttgtttggtcaattcgccaacattgatcaagctagatgggtttttaccaactccttctacaagttggaagaagaagttatcgaatggaccagaaagatctggaacttgaaagttattggtccaaccttgccatctatgtacttggataagagattggatgacgataaggacaacggtttcaacttgtacaaggctaaccatcatgaatgcatgaattggttggacgacaagccaaaagaatccgttgtttatgttgctttcggttctttggtcaatcatggtccagaacaagttgaagaaattaccagagccttgatcgattccgatgttaatttcttgtgggtcatcaagcacaaagaagaaggtaaattgccagaaaacttgtccgaagttatcaaaactggtaagggtttgattgtcgcttggtgtaaacaattggatgttttggctcatgaatccgttggttgtttcgttactcattgtggtttcaactccaccttggaagctatttctttgggtgttccagttgttgctatgccacaattttctgatcaaactaccaacgctaagttgttggacgaaattttgggtgttggtgttagagttaaggctgacgaaaatggtatcgttagaagaggtaacttggcttcttgcatcaagatgatcatggaagaagaaagaggtgtcatcattagaaagaacgctgttaagtggaaggatttggctaaagttgctgttcatgaaggtggtagttccgataatgatatcgttgaattcgtttccgaattgatcaaggcctaa

SEQ ID NO: 165 - protein, 460 aa, Artificial Sequence
  UGT74G1 Var_10
MAEQQKIKKSPHVLLIPFPLQGHINPFIQFGKRLISKGVKTTLVTTIHTLNSTLNHSNTTTTSIEIQAISDGCDEGGFMSAGESYLETFKQVGSKSLADLIKKLQSEGTTIDAIIYDSMTEWVLDVAIEFGIDGGSFFTQACVVNSLYYHVHKGLISLPLGETVSVPGFPVLQRWETPLILQNHEQIQSPWSQMLFGQFANIDQARWVFTNSFYKLEEEVIEWTRKIWNLKVIGPTLPSMYLDKRLDDDKDNGFNLYKANHHECMNWLDDKPKESVVYVAFGSLVNHGPEQVEEITRALIDSDVNFLWVIKHKEEGKLPENLSEVIKTGKGLIVAWCKQLDVLAHESVGCFVTHCGFNSTLEAISLGVPVVAMPQFSDQTTNAKLLDEILGVGVRVKADENGIVRRGNLASCIKMIMEEERGVIIRKNAVKWKDLAKVAVHEGGSSDNDIVEFVSELIKA

SEQ ID NO: 166 - DNA, 1383 bp, Artificial Sequence
  UGT74G1 Var_11
atggctgaacaacaaaagatcaagaagtctccacacgttttgttgattccatttccattgcaaggtcacatcaacccattcattcaattcggtaagagattgatttccaagggtgttaagactactttggttactaccatccataccttgaactctaccttgaaccattctaacactaccaccacctccattgaaattcaagctatttccgatggttgtgatgaaggtggttttgaatctgctggtgaatcttacttggaaacctttaagcaagttggttctaagtccttggccgatttgattaagaagttgcaatctgaaggtactaccattgatgccattatctacgattctatgaccgaatgggttttggatgttgctattgaattcggtattgatggtggttcattcttcactcaagcttgtgttgttaactccttgtactaccatgttcacaagggtttgatctcattgccattgggtgaaactgtttctgttccaggtttcccagttttacaaagatgggaaactccattgatcttgcaaaaccacgaacaaattcaatctccatggtcccaaatgttgtttggtcaattcgccaacattgatcaagctagatgggtttttaccaactccttctacaagttggaagaagaagttatcgaatggaccagaaagatctggaacttgaaagttattggtccaaccttgccatctatgtacttggataagagattggatgacgataaggacaacggtttcaacttgtacaaggctaaccatcatgaatgcatgaattggttggacgacaagccaaaagaatccgttgtttatgttgctttcggttctttggtcaaacatggtccagaacaagttgaagaaattaccagagccttgatcgattccgatgttaatttcttgtgggtcatcaagcacaaagaagaaggtaaattgccagaaaacttgtccgaagttatcaaaactggtaagggtttgattgtcgcttggtgtaaacaattggatgttttggctcatgaatccgttggttgtttcgttactcattgtggtttcaactccaccttggaagctatttctttgggtgttccagttgttgctatgccacaattttctgatcaaactaccaacgctaagttgttggacgaaattttgggtgttggtgttagagttaaggctgacgaaaatggtatcgttagaagaggtaacttggcttcttgcatcaagatgatcatggaagaagaaagaggtgtcatcattagaaagaacgctgttaagtggaaggatttggctaaagttgctgttcatgaaggtggtagttccgataatgatatcgttgaattcgtttccgaattgatcaaggcctaa

SEQ ID NO: 167 - protein, 460 aa, Artificial Sequence
  UGT74G1 Var_11
MAEQQKIKKSPHVLLIPFPLQGHINPFIQFGKRLISKGVKTTLVTTIHTLNSTLNHSNTTTTSIEIQAISDGCDEGGFESAGESYLETFKQVGSKSLADLIKKLQSEGTTIDAIIYDSMTEWVLDVAIEFGIDGGSFFTQACVVNSLYYHVHKGLISLPLGETVSVPGFPVLQRWETPLILQNHEQIQSPWSQMLFGQFANIDQARWVFTNSFYKLEEEVIEWTRKIWNLKVIGPTLPSMYLDKRLDDDKDNGFNLYKANHHECMNWLDDKPKESVVYVAFGSLVKHGPEQVEEITRALIDSDVNFLWVIKHKEEGKLPENLSEVIKTGKGLIVAWCKQLDVLAHESVGCFVTHCGFNSTLEAISLGVPVVAMPQFSDQTTNAKLLDEILGVGVRVKADENGIVRRGNLASCIKMIMEEERGVIIRKNAVKWKDLAKVAVHEGGSSDNDIVEFVSELIKA

SEQ ID NO: 168 - DNA, 1383 bp, Artificial Sequence
  UGT74G1 Var_12
atggctgaacaacaaaagatcaagaagtctccacacgttttgttgattccatttccattgcaaggtcacatcaacccattcattcaattcggtaagagattgatttccaagggtgttaagactactttggttactaccatccataccttgaactctaccttgaaccattctaacactaccaccacctccattgaaattcaagctatttccgatggttgtgatgaaggtggttttatgtctgctggtgaatcttacttggaaacctttaagcaagttggttctaagtccttggccgatttgattaagaagttgcaatctgaaggtactaccattgatgccattatctacgattctatgaccgaatgggttttggatgttgctattgaattcggtattgatggtggttcattcttcactcaagcttgtgttgttaactccttgtactaccatgttcacaagggtttgatctcattgccattgggtgaaactgtttctgttccaggtttcccagttttacaaagatgggaaactccattgatcttgcaaaaccacgaacaaattcaatctccatggtcccaaatgttgtttggtcaattcgccaacattgatcaagctagatgggtttttaccaactccttctacaagttggaagaagaagttatcgaatggaccagaaagatctggaacttgaaagttattggtccaaccttgccatctatgtacttggataagagattggatgacgataaggacaacggtttcaacttgtacaaggctaaccatcatgaatgcatgaattggttggacgacaagccaaaagaatccgttgtttatgttgctttcggttctttggtcactcatggtccagaacaagttgaagaaattaccagagccttgatcgattccgatgttaatttcttgtgggtcatcaagcacaaagaagaaggtaaattgccagaaaacttgtccgaagttatcaaaactggtaagggtttgattgtcgcttggtgtaaacaattggatgttttggctcatgaatccgttggttgtttcgttactcattgtggtttcaactccaccttggaagctatttctttgggtgttccagttgttgctatgccacaattttctgatcaaactaccaacgctaagttgttggacgaaattttgggtgttggtgttagagttaaggctgacgaaaatggtatcgttagaagaggtaacttggcttcttgcatcaagatgatcatggaagaagaaagaggtgtcatcattagaaagaacgctgttaagtggaaggatttggctaaagttgctgttcatgaaggtggtagttccgataatgatatcgttgaattcgtttccgaattgatcaaggcctaa

SEQ ID NO: 169 - protein, 460 aa, Artificial Sequence
  UGT74G1 Var_12
MAEQQKIKKSPHVLLIPFPLQGHINPFIQFGKRLISKGVKTTLVTTIHTLNSTLNHSNTTTTSIEIQAISDGCDEGGFMSAGESYLETFKQVGSKSLADLIKKLQSEGTTIDAIIYDSMTEWVLDVAIEFGIDGGSFFTQACVVNSLYYHVHKGLISLPLGETVSVPGFPVLQRWETPLILQNHEQIQSPWSQMLFGQFANIDQARWVFTNSFYKLEEEVIEWTRKIWNLKVIGPTLPSMYLDKRLDDDKDNGFNLYKANHHECMNWLDDKPKESVVYVAFGSLVTHGPEQVEEITRALIDSDVNFLWVIKHKEEGKLPENLSEVIKTGKGLIVAWCKQLDVLAHESVGCFVTHCGFNSTLEAISLGVPVVAMPQFSDQTTNAKLLDEILGVGVRVKADENGIVRRGNLASCIKMIMEEERGVIIRKNAVKWKDLAKVAVHEGGSSDNDIVEFVSELIKA

SEQ ID NO: 170 - DNA, 420 bp, Artificial Sequence
  pTEF1 promoter nucleotide sequence
gcacacaccatagcttcaaaatgtttctactccttttttactcttccagattttctcggactccgcgcatcgccgtaccacttcaaaacacccaagcacagcatactaaatttcccctctttcttcctctagggtgtcgttaattacccgtactaaaggtttggaaaagaaaaaagagaccgcctcgtttctttttcttcgtcgaaaaaggcaataaaaatttttatcacgtttctttttcttgaaaatttttttttttgatttttttctctttcgatgacctcccattgatatttaagttaataaacggtcttcaatttctcaagtttcagtttcatttttcttgttctattacaactttttttacttcttgctcattagaaagaaagcatagcaatctaatctaagttttaattacaa

SEQ ID NO: 171 - DNA, 195 bp, Artificial Sequence
  tADH1 terminator nucleotide sequence
gtagatacgttgttgacacttctaaataagcgaatttcttatgatttatgatttttattattaaataagttataaaaaaaataagtgtatacaaattttaaagtgactcttaggttttaaaacgaaaattcttattcttgagtaactctttcctgtaggtcaggttgctttctcaggtatagcatgaggtcgctc

SEQ ID NO: 172 - DNA, 42 bp, Artificial Sequence
  linker nucleotide sequence
gaaggtaaatcctctggctcaggtagcgagtctaaaagtacc

SEQ ID NO: 173 - DNA, 1998 bp, Artificial Sequence
  Chim_10
atgaaagcgcaatatgaagatggaaagcagtatacgaccttagaaaaaccagtcgctggagctccgcaagtcttggaattctttagttttttttgtccgcattgttaccagtttgaggaagtcttgcatatatccgacaacgtcaaaaagaagttgccagaaggcgttaaaatgacgaaatatcacgttaactttatgggaggtgacttgggaaaagatcttactcaagcctgggccgttgcaatggcattgggagttgaagataaagttacagtgcccttgtttgaaggagttcaaaagacccagactataaggtcagcctccgacattagagacgtctttatcaatgctgggattaagggcgaagagtatgatgccgcgtggaactcctttgttgtcaagagtttagtcgcacaacaagaaaaggctgctgcagacgttcagttaaggggtgtgccagccatgttcgttaatggtaagtatcagttaaatccacaggggatggatacatcaaacatggatgtgttcgtgcaacagtacgcagacactgttaaatatttgtcagagaagaaagaaggtaaatcctctggctcaggtagcgagtctaaaagtaccatggctgaacaacaaaagatcaagaagtctccacacgttttgttgattccatttccattgcaaggtcacatcaacccattcattcaattcggtaagagattgatttccaagggtgttaagactactttggttactaccatccataccttgaactctaccttgaaccattctaacactaccaccacctccattgaaattcaagctatttccgatggttgtgatgaaggtggttttatgtctgctggtgaatcttacttggaaacctttaagcaagttggttctaagtccttggccgatttgattaagaagttgcaatctgaaggtactaccattgatgccattatctacgattctatgaccgaatgggttttggatgttgctattgaattcggtattgatggtggttcattcttcactcaagcttgtgttgttaactccttgtactaccatgttcacaagggtttgatctcattgccattgggtgaaactgtttctgttccaggtttcccagttttacaaagatgggaaactccattgatcttgcaaaaccacgaacaaattcaatctccatggtcccaaatgttgtttggtcaattcgccaacattgatcaagctagatgggtttttaccaactccttctacaagttggaagaagaagttatcgaatggaccagaaagatctggaacttgaaagttattggtccaaccttgccatctatgtacttggataagagattggatgacgataaggacaacggtttcaacttgtacaaggctaaccatcatgaatgcatgaattggttggacgacaagccaaaagaatccgttgtttatgttgctttcggttctttggtcaaacatggtccagaacaagttgaagaaattaccagagccttgatcgattccgatgttaatttcttgtgggtcatcaagcacaaagaagaaggtaaattgccagaaaacttgtccgaagttatcaaaactggtaagggtttgattgtcgcttggtgtaaacaattggatgttttggctcatgaatccgttggttgtttcgttactcattgtggtttcaactccaccttggaagctatttctttgggtgttccagttgttgctatgccacaattttctgatcaaactaccaacgctaagttgttggacgaaattttgggtgttggtgttagagttaaggctgacgaaaatggtatcgttagaagaggtaacttggcttcttgcatcaagatgatcatggaagaagaaagaggtgtcatcattagaaagaacgctgttaagtggaaggatttggctaaagttgctgttcatgaaggtggtagttccgataatgatatcgttgaattcgtttccgaattgatcaaggcctaa

SEQ ID NO: 174 - protein, 665 aa, Artificial Sequence
  Chim_10
MKAQYEDGKQYTTLEKPVAGAPQVLEFFSFFCPHCYQFEEVLHISDNVKKKLPEGVKMTKYHVNFMGGDLGKDLTQAWAVAMALGVEDKVTVPLFEGVQKTQTIRSASDIRDVFINAGIKGEEYDAAWNSFVVKSLVAQQEKAAADVQLRGVPAMFVNGKYQLNPQGMDTSNMDVFVQQYADTVKYLSEKKEGKSSGSGSESKSTMAEQQKIKKSPHVLLIPFPLQGHINPFIQFGKRLISKGVKTTLVTTIHTLNSTLNHSNTTTTSIEIQAISDGCDEGGFMSAGESYLETFKQVGSKSLADLIKKLQSEGTTIDAIIYDSMTEWVLDVAIEFGIDGGSFFTQACVVNSLYYHVHKGLISLPLGETVSVPGFPVLQRWETPLILQNHEQIQSPWSQMLFGQFANIDQARWVFTNSFYKLEEEVIEWTRKIWNLKVIGPTLPSMYLDKRLDDDKDNGFNLYKANHHECMNWLDDKPKESVVYVAFGSLVKHGPEQVEEITRALIDSDVNFLWVIKHKEEGKLPENLSEVIKTGKGLIVAWCKQLDVLAHESVGCFVTHCGFNSTLEAISLGVPVVAMPQFSDQTTNAKLLDEILGVGVRVKADENGIVRRGNLASCIKMIMEEERGVIIRKNAVKWKDLAKVAVHEGGSSDNDIVEFVSELIKA

SEQ ID NO: 175 - DNA, 2526 bp, Artificial Sequence
  Chim_11
atgaaaacagaagaagggaaattggttatatggataaacggtgataagggctataacggattagccgaggtaggtaagaagtttgaaaaagatactggtataaaagttactgttgaacatccggacaaactggaagaaaaatttcctcaagttgctgcaactggcgatggtccagatataatcttctgggcacatgacagattcggcggttacgcacagtccggattgctggctgagatcacccctgacaaggcgttccaagataagctatacccttttacatgggacgcagtgagatacaatggaaaattgattgcttacccaattgcagttgaggcactgtctctgatttacaataaggacttgctaccaaaccctccaaaaacctgggaagaaatcccagccctggacaaagaactaaaagctaaaggaaaatccgccttgatgtttaacttgcaagagccttatttcacatggccgctaattgctgcagatggcggttatgcttttaaatatgaaaacggtaagtatgacatcaaagatgttggagtcgacaatgcaggtgctaaggccggcttaactttcttagtggacttaatcaagaataagcatatgaatgcagacactgattacagcatagcggaggctgctttcaacaaaggtgaaacagctatgacaataaatggcccttgggcctggtctaatatcgacacgtctaaagttaattatggggtaacagtacttccaacgtttaaaggccagccatcaaagccctttgtaggtgtcctgagtgccggtattaacgcagccagcccgaacaaagagttagcgaaagaattcttagaaaattatttactgaccgatgagggtcttgaagcagtgaacaaggataaacctttgggtgcagtcgctttgaagagttacgaagaagaactggctaaggaccccagaattgcagccactatggaaaatgcccaaaagggagaaattatgccaaatatacctcaaatgtcagccttctggtatgcggttaggactgccgttataaacgctgctagtggaaggcagacggtggatgaagcacttaaagatgcgcagacagaaggtaaatcctctggctcaggtagcgagtctaaaagtaccatggctgaacaacaaaagatcaagaagtctccacacgttttgttgattccatttccattgcaaggtcacatcaacccattcattcaattcggtaagagattgatttccaagggtgttaagactactttggttactaccatccataccttgaactctaccttgaaccattctaacactaccaccacctccattgaaattcaagctatttccgatggttgtgatgaaggtggttttatgtctgctggtgaatcttacttggaaacctttaagcaagttggttctaagtccttggccgatttgattaagaagttgcaatctgaaggtactaccattgatgccattatctacgattctatgaccgaatgggttttggatgttgctattgaattcggtattgatggtggttcattcttcactcaagcttgtgttgttaactccttgtactaccatgttcacaagggtttgatctcattgccattgggtgaaactgtttctgttccaggtttcccagttttacaaagatgggaaactccattgatcttgcaaaaccacgaacaaattcaatctccatggtcccaaatgttgtttggtcaattcgccaacattgatcaagctagatgggtttttaccaactccttctacaagttggaagaagaagttatcgaatggaccagaaagatctggaacttgaaagttattggtccaaccttgccatctatgtacttggataagagattggatgacgataaggacaacggtttcaacttgtacaaggctaaccatcatgaatgcatgaattggttggacgacaagccaaaagaatccgttgtttatgttgctttcggttctttggtcaaacatggtccagaacaagttgaagaaattaccagagccttgatcgattccgatgttaatttcttgtgggtcatcaagcacaaagaagaaggtaaattgccagaaaacttgtccgaagttatcaaaactggtaagggtttgattgtcgcttggtgtaaacaattggatgttttggctcatgaatccgttggttgtttcgttactcattgtggtttcaactccaccttggaagctatttctttgggtgttccagttgttgctatgccacaattttctgatcaaactaccaacgctaagttgttggacgaaattttgggtgttggtgttagagttaaggctgacgaaaatggtatcgttagaagaggtaacttggcttcttgcatcaagatgatcatggaagaagaaagaggtgtcatcattagaaagaacgctgttaagtggaaggatttggctaaagttgctgttcatgaaggtggtagttccgataatgatatcgttgaattcgtttccgaattgatcaaggcctaa

SEQ ID NO: 176 - protein, 841 aa, Artificial Sequence
  Chim_11
MKTEEGKLVIWINGDKGYNGLAEVGKKFEKDTGIKVTVEHPDKLEEKFPQVAATGDGPDIIFWAHDRFGGYAQSGLLAEITPDKAFQDKLYPFTWDAVRYNGKLIAYPIAVEALSLIYNKDLLPNPPKTWEEIPALDKELKAKGKSALMFNLQEPYFTWPLIAADGGYAFKYENGKYDIKDVGVDNAGAKAGLTFLVDLIKNKHMNADTDYSIAEAAFNKGETAMTINGPWAWSNIDTSKVNYGVTVLPTFKGQPSKPFVGVLSAGINAASPNKELAKEFLENYLLTDEGLEAVNKDKPLGAVALKSYEEELAKDPRIAATMENAQKGEIMPNIPQMSAFWYAVRTAVINAASGRQTVDEALKDAQTEGKSSGSGSESKSTMAEQQKIKKSPHVLLIPFPLQGHINPFIQFGKRLISKGVKTTLVTTIHTLNSTLNHSNTTTTSIEIQAISDGCDEGGFMSAGESYLETFKQVGSKSLADLIKKLQSEGTTIDAIIYDSMTEWVLDVAIEFGIDGGSFFTQACVVNSLYYHVHKGLISLPLGETVSVPGFPVLQRWETPLILQNHEQIQSPWSQMLFGQFANIDQARWVFTNSFYKLEEEVIEWTRKIWNLKVIGPTLPSMYLDKRLDDDKDNGFNLYKANHHECMNWLDDKPKESVVYVAFGSLVKHGPEQVEEITRALIDSDVNFLWVIKHKEEGKLPENLSEVIKTGKGLIVAWCKQLDVLAHESVGCFVTHCGFNSTLEAISLGVPVVAMPQFSDQTTNAKLLDEILGVGVRVKADENGIVRRGNLASCIKMIMEEERGVIIRKNAVKWKDLAKVAVHEGGSSDNDIVEFVSELIKA

SEQ ID NO: 177 - DNA, 2910 bp, Artificial Sequence
  Chim_12
atgaataaggagattctagcagtcgttgaagcagtaagtaacgaaaaagcattgcctagggagaaaatcttcgaagccctagaaagcgctttggccacagccacgaaaaagaagtacgagcaagaaattgacgttagagttcagatcgacaggaaatcaggtgatttcgatacatttaggagatggttagtagtagatgaggttacacagcctactaaggagattacattagaggcggccagatacgaagacgaatctttgaacttaggggactatgttgaggatcaaattgaatcagttacttttgatagaattacaactcaaacagccaaacaagtcatagttcaaaaagtgagggaagccgaaagagcaatggtggtcgaccaatttcgtgagcacgaaggagagatcataacaggtgtcgttaaaaaggttaatagagataatatttctttggatcttgggaataatgccgaagctgttatcctgagggaagatatgttgccgagggaaaatttcagacctggagatcgtgtcagaggtgttttgtattctgtacgtccagaggcaagaggagctcaattatttgttactcgttctaaaccggagatgcttattgaactatttaggattgaggtgcctgaaattggagaagaagttattgagatcaaagccgctgcacgtgatccaggatcaagagcgaagattgctgttaaaacaaatgataaacgtatcgatcccgtgggtgcgtgtgttggtatgaggggtgctagagtccaggctgtaagcaccgaactgggaggcgagaggattgacattgtcttgtgggacgataatcctgcccagtttgtaataaacgcaatggctcctgctgatgtggcctctatagtcgtggatgaggacaaacataccatggatatagcagtagaagctggtaatttagcccaagcaattggaagaaacggtcaaaacgtccgtttagcttcccagttgtctggttgggaactgaacgtgatgacggttgatgatttacaagctaagcaccaagcagaggctcatgcagcgattgataccttcactaaatatctagatatagacgaggattttgcaactgtgcttgttgaagaaggcttttctacgttagaagaactagcttacgtcccaatgaaggaattattagaaatcgagggtttggatgaacctacagtggaggctttgagagaaagggccaagaatgccctagcaactatagctcaagcacaagaggaatcactgggagataataagcctgcagacgatttgctgaacctagaaggtgtagatagggacttggcttttaagctagcagccagaggcgtgtgtacactagaggatttggctgaacaaggaatagatgacctagctgacattgaagggttgacagatgaaaaagctggggccttaataatggccgctaggaatatttgctggttcggggatgaggcagaaggtaaatcctctggctcaggtagcgagtctaaaagtaccatggctgaacaacaaaagatcaagaagtctccacacgttttgttgattccatttccattgcaaggtcacatcaacccattcattcaattcggtaagagattgatttccaagggtgttaagactactttggttactaccatccataccttgaactctaccttgaaccattctaacactaccaccacctccattgaaattcaagctatttccgatggttgtgatgaaggtggttttatgtctgctggtgaatcttacttggaaacctttaagcaagttggttctaagtccttggccgatttgattaagaagttgcaatctgaaggtactaccattgatgccattatctacgattctatgaccgaatgggttttggatgttgctattgaattcggtattgatggtggttcattcttcactcaagcttgtgttgttaactccttgtactaccatgttcacaagggtttgatctcattgccattgggtgaaactgtttctgttccaggtttcccagttttacaaagatgggaaactccattgatcttgcaaaaccacgaacaaattcaatctccatggtcccaaatgttgtttggtcaattcgccaacattgatcaagctagatgggtttttaccaactccttctacaagttggaagaagaagttatcgaatggaccagaaagatctggaacttgaaagttattggtccaaccttgccatctatgtacttggataagagattggatgacgataaggacaacggtttcaacttgtacaaggctaaccatcatgaatgcatgaattggttggacgacaagccaaaagaatccgttgtttatgttgctttcggttctttggtcaaacatggtccagaacaagttgaagaaattaccagagccttgatcgattccgatgttaatttcttgtgggtcatcaagcacaaagaagaaggtaaattgccagaaaacttgtccgaagttatcaaaactggtaagggtttgattgtcgcttggtgtaaacaattggatgttttggctcatgaatccgttggttgtttcgttactcattgtggtttcaactccaccttggaagctatttctttgggtgttccagttgttgctatgccacaattttctgatcaaactaccaacgctaagttgttggacgaaattttgggtgttggtgttagagttaaggctgacgaaaatggtatcgttagaagaggtaacttggcttcttgcatcaagatgatcatggaagaagaaagaggtgtcatcattagaaagaacgctgttaagtggaaggatttggctaaagttgctgttcatgaaggtggtagttccgataatgatatcgttgaattcgtttccgaattgatcaaggcctaa

SEQ ID NO: 178 - protein, 969 aa, Artificial Sequence
  Chim_12
MNKEILAVVEAVSNEKALPREKIFEALESALATATKKKYEQEIDVRVQIDRKSGDFDTFRRWLVVDEVTQPTKEITLEAARYEDESLNLGDYVEDQIESVTFDRITTQTAKQVIVQKVREAERAMVVDQFREHEGEIITGVVKKVNRDNISLDLGNNAEAVILREDMLPRENFRPGDRVRGVLYSVRPEARGAQLFVTRSKPEMLIELFRIEVPEIGEEVIEIKAAARDPGSRAKIAVKTNDKRIDPVGACVGMRGARVQAVSTELGGERIDIVLWDDNPAQFVINAMAPADVASIVVDEDKHTMDIAVEAGNLAQAIGRNGQNVRLASQLSGWELNVMTVDDLQAKHQAEAHAAIDTFTKYLDIDEDFATVLVEEGFSTLEELAYVPMKELLEIEGLDEPTVEALRERAKNALATIAQAQEESLGDNKPADDLLNLEGVDRDLAFKLAARGVCTLEDLAEQGIDDLADIEGLTDEKAGALIMAARNICWFGDEAEGKSSGSGSESKSTMAEQQKIKKSPHVLLIPFPLQGHINPFIQFGKRLISKGVKTTLVTTIHTLNSTLNHSNTTTTSIEIQAISDGCDEGGFMSAGESYLETFKQVGSKSLADLIKKLQSEGTTIDAIIYDSMTEWVLDVAIEFGIDGGSFFTQACVVNSLYYHVHKGLISLPLGETVSVPGFPVLQRWETPLILQNHEQIQSPWSQMLFGQFANIDQARWVFTNSFYKLEEEVIEWTRKIWNLKVIGPTLPSMYLDKRLDDDKDNGFNLYKANHHECMNWLDDKPKESVVYVAFGSLVKHGPEQVEEITRALIDSDVNFLWVIKHKEEGKLPENLSEVIKTGKGLIVAWCKQLDVLAHESVGCFVTHCGFNSTLEAISLGVPVVAMPQFSDQTTNAKLLDEILGVGVRVKADENGIVRRGNLASCIKMIMEEERGVIIRKNAVKWKDLAKVAVHEGGSSDNDIVEFVSELIKA

SEQ ID NO: 179 - DNA, 1719 bp, Artificial Sequence
  Chim_13
atgagtgactctgaagtgaatcaagaggctaaaccagaagtaaagcccgaagtaaagccagagacccacatcaacttgaaggtttcagacgggtcttcagagatattctttaaaatcaaaaagacaacgcccttgagaaggctaatggaagcgtttgccaagagacaaggaaaagaaatggatagtttaactttcttgtacgatgggattgagattcaagcagatcaaactccggaagatttggacatggaagataatgatatcattgaagctcatagagaacaaatcggaggtgaaggtaaatcctctggctcaggtagcgagtctaaaagtaccatggctgaacaacaaaagatcaagaagtctccacacgttttgttgattccatttccattgcaaggtcacatcaacccattcattcaattcggtaagagattgatttccaagggtgttaagactactttggttactaccatccataccttgaactctaccttgaaccattctaacactaccaccacctccattgaaattcaagctatttccgatggttgtgatgaaggtggttttatgtctgctggtgaatcttacttggaaacctttaagcaagttggttctaagtccttggccgatttgattaagaagttgcaatctgaaggtactaccattgatgccattatctacgattctatgaccgaatgggttttggatgttgctattgaattcggtattgatggtggttcattcttcactcaagcttgtgttgttaactccttgtactaccatgttcacaagggtttgatctcattgccattgggtgaaactgtttctgttccaggtttcccagttttacaaagatgggaaactccattgatcttgcaaaaccacgaacaaattcaatctccatggtcccaaatgttgtttggtcaattcgccaacattgatcaagctagatgggtttttaccaactccttctacaagttggaagaagaagttatcgaatggaccagaaagatctggaacttgaaagttattggtccaaccttgccatctatgtacttggataagagattggatgacgataaggacaacggtttcaacttgtacaaggctaaccatcatgaatgcatgaattggttggacgacaagccaaaagaatccgttgtttatgttgctttcggttctttggtcaaacatggtccagaacaagttgaagaaattaccagagccttgatcgattccgatgttaatttcttgtgggtcatcaagcacaaagaagaaggtaaattgccagaaaacttgtccgaagttatcaaaactggtaagggtttgattgtcgcttggtgtaaacaattggatgttttggctcatgaatccgttggttgtttcgttactcattgtggtttcaactccaccttggaagctatttctttgggtgttccagttgttgctatgccacaattttctgatcaaactaccaacgctaagttgttggacgaaattttgggtgttggtgttagagttaaggctgacgaaaatggtatcgttagaagaggtaacttggcttcttgcatcaagatgatcatggaagaagaaagaggtgtcatcattagaaagaacgctgttaagtggaaggatttggctaaagttgctgttcatgaaggtggtagttccgataatgatatcgttgaattcgtttccgaattgatcaaggcctaa

SEQ ID NO: 180 - protein, 572 aa, Artificial Sequence
  Chim_13
MSDSEVNQEAKPEVKPEVKPETHINLKVSDGSSEIFFKIKKTTPLRRLMEAFAKRQGKEMDSLTFLYDGIEIQADQTPEDLDMEDNDIIEAHREQIGGEGKSSGSGSESKSTMAEQQKIKKSPHVLLIPFPLQGHINPFIQFGKRLISKGVKTTLVTTIHTLNSTLNHSNTTTTSIEIQAISDGCDEGGFMSAGESYLETFKQVGSKSLADLIKKLQSEGTTIDAIIYDSMTEWVLDVAIEFGIDGGSFFTQACVVNSLYYHVHKGLISLPLGETVSVPGFPVLQRWETPLILQNHEQIQSPWSQMLFGQFANIDQARWVFTNSFYKLEEEVIEWTRKIWNLKVIGPTLPSMYLDKRLDDDKDNGFNLYKANHHECMNWLDDKPKESVVYVAFGSLVKHGPEQVEEITRALIDSDVNFLWVIKHKEEGKLPENLSEVIKTGKGLIVAWCKQLDVLAHESVGCFVTHCGFNSTLEAISLGVPVVAMPQFSDQTTNAKLLDEILGVGVRVKADENGIVRRGNLASCIKMIMEEERGVIIRKNAVKWKDLAKVAVHEGGSSDNDIVEFVSELIKA

SEQ ID NO: 181 - DNA, 462 bp, Saccharomyces cerevisiae
atgtctagtcaaacagaaagaacttttattgcggtaaaaccagatggtgtccagaggggcttagtatctcaaattctatctcgttttgaaaaaaaaggttacaaactagttgctattaaattagttaaagcggatgataaattactagagcaacattacgcagagcatgttggtaaaccatttttcccaaagatggtatcctttatgaagtctggtcccattttggccacggtctgggagggaaaagatgtggttagacaaggaagaactattcttggtgctactaatcctttgggcagtgcaccaggtaccattagaggtgatttcggtattgacctaggcagaaacgtctgtcacggcagtgattctgttgatagcgctgaacgtgaaatcaatttgtggtttaagaaggaagagttagttgattgggaatctaatcaagctaagtggatttatgaatga

SEQ ID NO: 182 - protein, 153 aa, Saccharomyces cerevisiae
MSSQTERTFIAVKPDGVQRGLVSQILSRFEKKGYKLVAIKLVKADDKLLEQHYAEHVGKPFFPKMVSFMKSGPILATVWEGKDVVRQGRTILGATNPLGSAPGTIRGDFGIDLGRNVCHGSDSVDSAEREINLWFKKEELVDWESNQAKWIYE

SEQ ID NO: 183 - DNA, 192 bp, Artificial Sequence
  CYC1 terminator nucleotide sequence
atccgctctaaccgaaaaggaaggagttagacaacctgaagtctaggtccctatttattttttttaatagttatgttagtattaagaacgttatttatatttcaaatttttcttttttttctgtacaaacgcgtgtacgcatgtaacattatactgaaaaccttgcttgagaaggttttgggacgctcgaag

SEQ ID NO: 184 - DNA, 1713 bp, Saccharomyces cerevisiae
atgtcacttctaatagattctgtaccaacagttgcttataaggaccaaaaaccgggtacttcaggtttacgtaagaagaccaaggttttcatggatgagcctcattatactgagaacttcattcaagcaacaatgcaatctatccctaatggctcagagggaaccactttagttgttggaggagatggtcgtttctacaacgatgttatcatgaacaagattgccgcagtaggtgctgcaaacggtgtcagaaagttagtcattggtcaaggcggtttactttcaacaccagctgcttctcatataattagaacatacgaggaaaagtgtaccggtggtggtatcatattaactgcctcacacaacccaggcggtccagagaatgatttaggtatcaagtataatttacctaatggtgggccagctccagagagtgtcactaacgctatctgggaagcgtctaaaaaattaactcactataaaattataaagaacttccccaagttgaatttgaacaagcttggtaaaaaccaaaaatatggcccattgttagtggacataattgatcctgccaaagcatacgttcaatttctgaaggaaatttttgattttgacttaattaaaagcttcttagcgaaacagcgcaaagacaaagggtggaagttgttgtttgactccttaaatggtattacaggaccatatggtaaggctatatttgttgatgaatttggtttaccggcagaggaagttcttcaaaattggcaccctttacctgatttcggcggtttacatcccgatccgaatctaacctatgcacgaactcttgttgacagggttgaccgcgaaaaaattgcctttggagcagcctccgatggtgatggtgataggaatatgatttacggttatggccctgctttcgtttcgccaggtgattctgttgccattattgccgaatatgcacccgaaattccatacttcgccaaacaaggtatttatggcttggcacgttcatttcctacatcctcagccattgatcgtgttgcagcaaaaaagggattaagatgttacgaagttccaaccggctggaaattcttctgtgccttatttgatgctaaaaagctatcaatctgtggtgaagaatccttcggtacaggttccaatcatatcagagaaaaggacggtctatgggccattattgcttggttaaatatcttggctatctaccataggcgtaaccctgaaaaggaagcttcgatcaaaactattcaggacgaattttggaacgagtatggccgtactttcttcacaagatacgattacgaacatatcgaatgcgagcaggccgaaaaagttgtagctcttttgagtgaatttgtatcaaggccaaacgtttgtggctcccacttcccagctgatgagtctttaaccgttatcgattgtggtgatttttcgtatagagatctagatggctccatctctgaaaatcaaggccttttcgtaaagttttcgaatgggactaaatttgttttgaggttatccggcacaggcagttctggtgcaacaataagattatacgtagaaaagtatactgataaaaaggagaactatggccaaacagctgacgtcttcttgaaacccgtcatcaactccattgtaaaattcttaagatttaaagaaattttaggaacagacgaaccaacagtccgcacatag

SEQ ID NO: 185 - protein, 570 aa, Saccharomyces cerevisiae
MSLLIDSVPTVAYKDQKPGTSGLRKKTKVFMDEPHYTENFIQATMQSIPNGSEGTTLVVGGDGRFYNDVIMNKIAAVGAANGVRKLVIGQGGLLSTPAASHIIRTYEEKCTGGGIILTASHNPGGPENDLGIKYNLPNGGPAPESVTNAIWEASKKLTHYKIIKNFPKLNLNKLGKNQKYGPLLVDIIDPAKAYVQFLKEIFDFDLIKSFLAKQRKDKGWKLLFDSLNGITGPYGKAIFVDEFGLPAEEVLQNWHPLPDFGGLHPDPNLTYARTLVDRVDREKIAFGAASDGDGDRNMIYGYGPAFVSPGDSVAIIAEYAPEIPYFAKQGIYGLARSFPTSSAIDRVAAKKGLRCYEVPTGWKFFCALFDAKKLSICGEESFGTGSNHIREKDGLWAIIAWLNILAIYHRRNPEKEASIKTIQDEFWNEYGRTFFTRYDYEHIECEQAEKVVALLSEFVSRPNVCGSHFPADESLTVIDCGDFSYRDLDGSISENQGLFVKFSNGTKFVLRLSGTGSSGATIRLYVEKYTDKKENYGQTADVFLKPVINSIVKFLRFKEILGTDEPTVRT

SEQ ID NO: 186 - DNA, 1710 bp, Saccharomyces cerevisiae
atgtcatttcaaattgaaacggttcccaccaaaccatatgaagaccaaaagcctggtacctctggtttgcgtaagaagacaaaggtgtttaaagacgaacctaactacacagaaaatttcattcaatcgatcatggaagctattccagagggttctaaaggtgccactcttgttgtcggtggtgatgggcgttactacaatgatgtcattcttcataagattgccgctatcggtgctgccaacggtattaaaaagttagttattggccagcatggtcttctgtctacgccagccgcttctcacatcatgagaacctacgaggaaaaatgtactggtggtattatcttaaccgcctcacataatccaggtggtccagaaaatgacatgggtattaagtataacttatccaatgggggtcctgctcctgaatccgtcacaaatgctatttgggagatttccaaaaagcttaccagctataagattatcaaagacttcccagaactagacttgggtacgataggcaagaacaagaaatacggtccattactcgttgacattatcgatattacaaaagattatgtcaacttcttgaaggaaatcttcgatttcgacttaatcaagaaattcatcgataatcaacgttctactaagaattggaagttactgtttgacagtatgaacggtgtaactggaccatacggtaaggctattttcgttgatgaatttggtttaccggcggatgaggttttacaaaactggcatccttctccggattttggtggtatgcatccagatccaaacttaacttatgccagttcgttagtgaaaagagtagatcgtgaaaagattgagtttggtgctgcatccgatggtgatggtgatagaaatatgatttacggttacggcccatctttcgtttctccaggtgactccgtcgcaattattgccgaatatgcagctgaaatcccatatttcgccaagcaaggtatatatggtctggcccgttcattccctacctcaggagccatagaccgtgttgccaaggcccatggtctaaactgttatgaggtcccaactggctggaaatttttctgtgctttgttcgacgctaaaaaattatctatttgtggtgaagaatcgtttggtactggttccaaccacgtaagggaaaaggacggtgtttgggccattatggcgtggttgaacatcttggccatttacaacaagcatcatccggagaacgaagcttctattaagacgatacagaatgaattctgggcaaagtacggccgtactttcttcactcgttatgattttgaaaaagttgaaacagaaaaagctaacaagattgtcgatcaattgagagcatatgttaccaaatcgggtgttgttaattccgccttcccagccgatgagtctcttaaggtcaccgattgtggtgatttttcatacacagatttggacggttctgtttctgaccatcaaggtttatatgtcaagctttccaatggtgcaagattcgttctaagattgtcaggtacaggttcttcaggtgctaccattagattgtacattgaaaaatactgcgatgataaatcacaataccaaaagacagctgaagaatacttgaagccaattattaactcggtcatcaagttcttgaactttaaacaagttttaggaactgaagaaccaacggttcgtacttaa

SEQ ID NO: 187 - protein, 569 aa, Saccharomyces cerevisiae
MSFQIETVPTKPYEDQKPGTSGLRKKTKVFKDEPNYTENFIQSIMEAIPEGSKGATLVVGGDGRYYNDVILHKIAAIGAANGIKKLVIGQHGLLSTPAASHIMRTYEEKCTGGIILTASHNPGGPENDMGIKYNLSNGGPAPESVTNAIWEISKKLTSYKIIKDFPELDLGTIGKNKKYGPLLVDIIDITKDYVNFLKEIFDFDLIKKFIDNQRSTKNWKLLFDSMNGVTGPYGKAIFVDEFGLPADEVLQNWHPSPDFGGMHPDPNLTYASSLVKRVDREKIEFGAASDGDGDRNMIYGYGPSFVSPGDSVAIIAEYAAEIPYFAKQGIYGLARSFPTSGAIDRVAKAHGLNCYEVPTGWKFFCALFDAKKLSICGEESFGTGSNHVREKDGVWAIMAWLNILAIYNKHHPENEASIKTIQNEFWAKYGRTFFTRYDFEKVETEKANKIVDQLRAYVTKSGVVNSAFPADESLKVTDCGDFSYTDLDGSVSDHQGLYVKLSNGARFVLRLSGTGSSGATIRLYIEKYCDDKSQYQKTAEEYLKPIINSVIKFLNFKQVLGTEEPTVRT

SEQ ID NO: 188 - DNA, 984 bp, Artificial Sequence
  pPGK1 promoter nucleotide sequence
ggaagtaccttcaaagaatggggtcttatcttgttttgcaagtaccactgagcaggataataatagaaatgataatatactatagtagagataacgtcgatgacttcccatactgtaattgcttttagttgtgtatttttagtgtgcaagtttctgtaaatcgattaatttttttttctttcctctttttattaaccttaatttttattttagattcctgacttcaactcaagacgcacagatattataacatctgcataataggcatttgcaagaattactcgtgagtaaggaaagagtgaggaactatcgcatacctgcatttaaagatgccgatttgggcgcgaatcctttattttggcttcaccctcatactattatcagggccagaaaaaggaagtgtttccctccttcttgaattgatgttaccctcataaagcacgtggcctcttatcgagaaagaaattaccgtcgctcgtgatttgtttgcaaaaagaacaaaactgaaaaaacccagacacgctcgacttcctgtcttcctattgattgcagcttccaatttcgtcacacaacaaggtcctagcgacggctcacaggttttgtaacaagcaatcgaaggttctggaatggcgggaaagggtttagtaccacatgctatgatgcccactgtgatctccagagcaaagttcgttcgatcgtactgttactctctctctttcaaacagaattgtccgaatcgtgtgacaacaacagcctgttctcacacactcttttcttctaaccaagggggtggtttagtttagtagaacctcgtgaaacttacatttacatatatataaacttgcataaattggtcaatgcaagaaatacatatttggtcttttctaattcgtagtttttcaagttcttagatgctttctttttctcttttttacagatcatcaaggaagtaattatctactttttacaacaaatataaaacaa

SEQ ID NO: 189 - DNA, 1500 bp, Saccharomyces cerevisiae
atgtccactaagaagcacaccaaaacacattccacttatgcattcgagagcaacacaaacagcgttgctgcctcacaaatgagaaacgccttaaacaagttggcggactctagtaaacttgacgatgctgctcgcgctaagtttgagaacgaactggattcgtttttcacgcttttcaggagatatttggtagagaagtcttctagaaccaccttggaatgggacaagatcaagtctcccaacccggatgaagtggttaagtatgaaattatttctcagcagcccgagaatgtctcaaacctttccaaattggctgttttgaagttgaacggtgggctgggtacctccatgggctgcgttggccctaaatctgttattgaagtgagagagggaaacacctttttggatttgtctgttcgtcaaattgaatacttgaacagacagtacgatagcgacgtgccattgttattgatgaattctttcaacactgacaaggatacggaacacttgattaagaagtattccgctaacagaatcagaatcagatctttcaatcaatccaggttcccaagagtctacaaggattctttattgcctgtccccaccgaatacgattctccactggatgcttggtatccaccaggtcacggtgatttgtttgaatctttacacgtatctggtgaactggatgccttaattgcccaaggaagagaaatattatttgtttctaacggtgacaacttgggtgctaccgtcgacttaaaaattttaaaccacatgatcgagactggtgccgaatatataatggaattgactgataagaccagagccgatgttaaaggtggtactttgatttcttacgatggtcaagtccgtttattggaagtcgcccaagttccaaaagaacacattgacgaattcaaaaatatcagaaagtttaccaacttcaacacgaataacttatggatcaatctgaaagcagtaaagaggttgatcgaatcgagcaatttggagatggaaatcattccaaaccaaaaaactataacaagagacggtcatgaaattaatgtcttacaattagaaaccgcttgtggtgctgctatcaggcattttgatggtgctcacggtgttgtcgttccaagatcaagattcttgcctgtcaagacctgttccgatttgttgctggttaaatcagatctattccgtctggaacacggttctttgaagttagacccatcccgttttggtccaaacccattaatcaagttgggctcgcatttcaaaaaggtttctggttttaacgcaagaatccctcacatcccaaaaatcgtcgagctagatcatttgaccatcactggtaacgtctttttaggtaaagatgtcactttgaggggtactgtcatcatcgtttgctccgacggtcataaaatcgatattccaaacggctccatattggaaaatgttgtcgttactggtaatttgcaaatcttggaacattga

SEQ ID NO: 190 - protein, 499 aa, Saccharomyces cerevisiae
MSTKKHTKTHSTYAFESNTNSVAASQMRNALNKLADSSKLDDAARAKFENELDSFFTLFRRYLVEKSSRTTLEWDKIKSPNPDEVVKYEIISQQPENVSNLSKLAVLKLNGGLGTSMGCVGPKSVIEVREGNTFLDLSVRQIEYLNRQYDSDVPLLLMNSFNTDKDTEHLIKKYSANRIRIRSFNQSRFPRVYKDSLLPVPTEYDSPLDAWYPPGHGDLFESLHVSGELDALIAQGREILFVSNGDNLGATVDLKILNHMIETGAEYIMELTDKTRADVKGGTLISYDGQVRLLEVAQVPKEHIDEFKNIRKFTNFNTNNLWINLKAVKRLIESSNLEMEIIPNQKTITRDGHEINVLQLETACGAAIRHFDGAHGVVVPRSRFLPVKTCSDLLLVKSDLFRLEHGSLKLDPSRFGPNPLIKLGSHFKKVSGFNARIPHIPKIVELDHLTITGNVFLGKDVTLRGTVIIVCSDGHKIDIPNGSILENVVVTGNLQILEH

1. A recombinant host cell capable of producing steviol, one or more steviol glycosides, and/or glycosylated steviol precursors, or a composition thereof, comprising:
(a) a gene encoding a polypeptide capable of glycosylating steviol or a steviol glycoside at its C-19 carboxyl group, having at least 55% sequence identity to the amino acid sequence set forth in SEQ ID NO:4, and further having at least one amino acid substitution corresponding to residues 79, 80, 81, 83, 184, 260, 286, or 377 of SEQ ID NO:4;
(b) a gene encoding a polypeptide capable of glycosylating steviol or the steviol glycoside at its C-19 carboxyl group, having at least 55% sequence identity to the amino acid sequence set forth in SEQ ID NO:4, and further having at least one amino acid substitution corresponding to residues 68, 69, 70, 71, 72, 73, 74, 75, 76, 77, 78, 79, 80, 81, 82, or 83 of SEQ ID NO:4;
(c) a gene encoding a bifunctional polypeptide capable of glycosylating steviol or the steviol glycoside at its C-19 carboxyl group and glycosylating steviol or the steviol glycoside at its C-13 hydroxyl group, having at least 50% sequence identity to the amino acid sequence set forth in any one of SEQ ID NOs:132, 134, 136, 138, 140, 142, 144, 146, or 148; and/or
(d) a gene encoding a tagged polypeptide capable of glycosylating steviol or the steviol glycoside at its C-19 carboxyl group, having at least 55% sequence identity to the amino acid sequence set forth in any one of SEQ ID NOs:174, 176, 178, or 180;
wherein at least one of the genes is a recombinant gene.

2. The recombinant host cell of claim 1, wherein the polypeptide capable of glycosylating steviol or the steviol glycoside at its C-19 carboxyl group comprises a M79V, M79E, S80C, A81W, E83K, A81W and E83K, H184V, H184T N260T, K286C, N260T and K286C, K286E, K286N, K286T, and/or S377Q amino acid substitution corresponding to SEQ ID NO:4.

3. (canceled)

4. The recombinant host cell of claim 1, wherein the polypeptide capable of glycosylating steviol or the steviol glycoside at its C-19 carboxyl group further comprises a tag sequence having at least 90% identity to any one of SEQ ID NOs:152-155.

5-6. (canceled)

7. The recombinant host cell of claim 1, wherein the recombinant host cell further comprises:
(a) a gene encoding a polypeptide capable of synthesizing geranylgeranyl pyrophosphate (GGPP) from farnesyl diphosphate (FPP) and isopentenyl diphosphate (IPP);
wherein the polypeptide capable of synthesizing GGPP comprises a polypeptide having at least 70% sequence identity to the amino acid sequence set forth in any one of SEQ ID NOs:20, 22, 24, 26, 28, 30, 32, or 116;
(b) a gene encoding a polypeptide capable of synthesizing ent-copalyl diphosphate from GGPP;
wherein the polypeptide capable of synthesizing ent-copalyl diphosphate comprises a polypeptide having at least 70% sequence identity to the amino acid sequence set forth in any one of SEQ ID NOs:34, 36, 38, 40, 42, or 120;
(c) a gene encoding an a polypeptide capable of synthesizing ent-kaurene from ent-copalyl diphosphate;
wherein the polypeptide capable of synthesizing ent-kaurene comprises a polypeptide having at least 70% sequence identity to the amino acid sequence set forth in any one of SEQ ID NOs:44, 46, 48, 50, or 52;
(d) a gene encoding a polypeptide capable of synthesizing ent-kaurenoic acid from ent-kaurene;
wherein the polypeptide capable of synthesizing ent-kaurenoic acid comprises a polypeptide having at least 70% sequence identity to the amino acid sequence set forth in any one of SEQ ID NOs:60, 62, 66, 68, 70, 72, 74, 76, or 117;
(e) a gene encoding a polypeptide capable of reducing cytochrome P450 complex;
wherein the polypeptide capable of reducing cytochrome P450 complex comprises a polypeptide having at least 70% sequence identity to the amino acid sequence set forth in any one of SEQ ID NOs:78, 80, 82, 84, 86, 88, 90, or 92;
(f) a gene encoding a polypeptide capable of synthesizing steviol from ent-kaurenoic acid;
wherein the polypeptide capable of synthesizing steviol comprises a polypeptide having at least 70% sequence identity to the amino acid sequence set forth in any one of SEQ ID NOs:94, 97, 100-104, 106, 108, 110, 112, or 114;
(g) a gene encoding a polypeptide capable of glycosylating steviol or a steviol glycoside at its C-13 hydroxyl group thereof;
wherein the polypeptide capable of glycosylating steviol or the steviol glycoside at its C-13 hydroxyl group thereof comprises a polypeptide having at least 55% sequence identity to the amino acid sequence set forth in SEQ ID NO:7;
(h) a gene encoding a polypeptide capable of beta 1,3 glycosylation of the C3′ of the 13-O-glucose, 19-O-glucose, or both 13-O-glucose and 19-O-glucose of a steviol glycoside;
wherein the polypeptide capable of beta 1,3 glycosylation of the C3′ of the 13-O-glucose, 19-O-glucose, or both 13-O-glucose and 19-O-glucose of the steviol glycoside comprises a polypeptide having at least 50% sequence identity to the amino acid sequence set forth in SEQ ID NO:9;
(i) a gene encoding a polypeptide capable of glycosylating steviol or a steviol glycoside at its C-19 carboxyl group thereof;
wherein the polypeptide capable of glycosylating steviol or the steviol glycoside at its C-19 carboxyl group thereof comprises a polypeptide having at least 55% sequence identity to the amino acid sequence set forth in SEQ ID NO:4; and/or
(k) a gene encoding a polypeptide capable of beta 1,2 glycosylation of the C2′ of the 13-O-glucose, 19-O-glucose, or both 13-O-glucose and 19-O-glucose of a steviol glycoside;
wherein the polypeptide capable of beta 1,2 glycosylation of the C2′ of the 13-O-glucose, 19-O-glucose, or both 13-O-glucose and 19-O-glucose of the steviol glycoside comprises a polypeptide having at least 65% sequence identity to the amino acid sequence set forth in SEQ ID NO:16 or a polypeptide having at least 80% sequence identity to the amino acid sequence set forth in SEQ ID NOs:11 or 13;
wherein at least one of the genes is a recombinant gene.

8. (canceled)

9. The recombinant host cell of claim 1, wherein expression of the one or more recombinant genes increases an amount of the one or more steviol glycosides and/or glycosylated steviol precursors, or a composition thereof accumulated by the cell by at least about 5%, at least about 10%, at least about 25%, at least about 50%, at least about 75%, or at least about 100% relative to a corresponding host lacking the one or more recombinant genes;
wherein the one or more steviol glycosides and/or glycosylated steviol precursors comprises ent-kaurenoic acid+3Glc (isomer 2), ent-kaurenol+2Glc (#8), ent-kaurenol+3Glc (isomer 1 and/or isomer 2), steviol-13-O-glucoside (13-SMG), steviol-19-O-glucoside (19-SMG), steviol-1,2-bioside, steviol-1,3-bioside, rubusoside, 1,2-stevioside, Rebaudioside A (RebA), Rebaudioside B (RebB), Rebaudioside E (RebE), steviol+4Glc (#24 and/or #25), steviol+4Glc (#26), steviol+4Glc (#33), Rebaudioside D (RebD), steviol+5Glc, Rebaudioside M (RebM), steviol+6Glc (#23), steviol+7Glc (isomer 2), and/or steviol+7Glc (isomer 5).

10-11. (canceled)

12. The recombinant host cell of claim 1, wherein expression of the one or more recombinant genes decreases the amount of the one or more steviol glycosides and/or glycosylated steviol precursors, or the composition thereof accumulated by the cell by at least about 5%, at least about 10%, at least about 25%, or at least about 50% relative to a corresponding host lacking the one or more recombinant genes;
wherein the one or more steviol glycosides and/or glycosylated steviol precursors comprises ent-kaurenoic acid+2Glc (#7), ent-kaurenoic acid+3Glc (isomer 1), ent-kaurenoic acid+3Glc (isomer 2), 19-SMG, 1,2-stevioside, RebA, steviol+4Glc (#26), RebD, steviol+5Glc (#24), steviol+5Glc (#25), steviol+6Glc (isomer 1), RebM, steviol+7Glc (isomer 2), and/or steviol+7Glc (isomer 5).

13-14. (canceled)

15. The recombinant host cell of claim 1, wherein the one or more steviol glycosides and/or glycosylated steviol precursors are, or the composition thereof comprises, 13-SMG, 19-SMG, steviol-1,2-bioside, steviol-1,3-bioside, 1,2-stevioside, 1,3-stevioside, rubusoside, RebA, RebB, RebC, RebD, RebE, Rebaudioside F (RebF), RebM, Rebaudioside Q (RebQ), Rebaudioside I (RebI), dulcoside A, a mono-glycosylated ent-kaurenoic acid, a di-glycosylated ent-kaurenoic acid, a tri-glycosylated ent-kaurenoic acid, a mono-glycosylated ent-kaurenols, a di-glycosylated ent-kaurenol, a tri-glycosylated ent-kaurenol, a tri-glycosylated steviol glycoside, a tetra-glycosylated steviol glycoside, a penta-glycosylated steviol glycoside, a hexa-glycosylated steviol glycoside, a hepta-glycosylated steviol glycoside, and/or an isomer thereof.

16. The recombinant host cell of claim 15, wherein:
(a) the di-glycosylated ent-kaurenoic acid comprises KA2.7 of Table 1;
(b) the tri-glycosylated ent-kaurenoic acid comprises KA3.1 or KA3.2 of Table 1;
(c) the di-glycosylated ent-kaurenol comprises KL2.8 of Table 1;
(d) the tri-glycosylated ent-kaurenol comprises KL3.1 or KOL3.2 of Table 1;
(e) the steviol glycoside comprises 13-SMG, 19-SMG, steviol-1,2-bioside, steviol-1,3-bioside, rubusoside, RebA, RebE, RebD or RebM;
(f) the tetra-glycosylated steviol comprises Compound 4.26 or Compound 4.33 of Table 1;
(g) the penta-glycosylated steviol comprises Compound 5.24 or Compound 5.25 of Table 1;
(h) the hexa-glycosylated steviol comprises Compound 6.1 or Compound 6.23 of Table 1; and/or
(i) the hepta-glycosylated steviol comprises Compound 7.2 or Compound 7.5 of Table 1.

17. The recombinant host cell of claim 1, wherein the recombinant host cell comprises a plant cell, a mammalian cell, an insect cell, a fungal cell, an algal cell, or a bacterial cell.

18. A method of producing one or more steviol glycosides and/or glycosylated steviol precursors, or a composition thereof in a cell culture, comprising growing the recombinant host cell of claim 1 in the cell culture, under conditions in which the genes are expressed, and wherein the one or more steviol glycosides and/or glycosylated steviol precursors, or the composition thereof is produced by the recombinant host cell in the cell culture.

19. The method of claim 18, wherein the genes are constitutively expressed and/or expression of the genes is induced.

20-21. (canceled)

22. The method of claim 18, further comprising isolating from the cell cultures the one or more steviol glycosides and/or glycosylated steviol precursors or the composition thereof produced thereby.

23. (canceled)

24. The method of claim 18, further comprising recovering the one or more steviol glycosides and/or glycosylated steviol precursors or the composition thereof from the cell culture,
wherein the cell culture is enriched for the one or more steviol glycosides and/or glycosylated steviol precursors, or the composition thereof relative to a steviol glycoside composition from a Stevia plant and has a reduced level of Stevia plant-derived components relative to a plant-derived Stevia extract; and
wherein the recovered one or more steviol glycosides and/or glycosylated steviol precursors or the composition thereof are present in relative amounts that are different from a steviol glycoside composition recovered from a Stevia plant and have a reduced level of Stevia plant-derived components relative to a plant-derived Stevia extract.

25. (canceled)

26. A method for producing one or more steviol glycosides and/or glycosylated steviol precursors, or a composition thereof, comprising whole cell bioconversion of plant-derived or synthetic steviol, steviol precursors, glycosylated steviol precursors and/or steviol glycosides in a cell culture medium of a recombinant host cell using:
(a) a polypeptide capable of glycosylating steviol or a steviol glycoside at its C-19 carboxyl group having at least 55% sequence identity to the amino acid sequence set forth in SEQ ID NO:4, and further having at least one amino acid substitution corresponding to residues 79, 80, 81, 83, 184, 260, 286, or 377 of SEQ ID NO:4;
(b) a polypeptide capable of glycosylating steviol or a steviol glycoside at its C-19 carboxyl group, having at least 55% sequence identity to the amino acid sequence set forth in SEQ ID NO:4, and further having at least one amino acid substitution corresponding to residues 68, 69, 70, 71, 72, 73, 74, 75, 76, 77, 78, 79, 80, 81, 82, or 83 of SEQ ID NO:4;
(c) a bifunctional polypeptide capable of glycosylating steviol or a steviol glycoside at its C-19 carboxyl group and glycosylating steviol or a steviol glycoside at its C-13 hydroxyl group, having at least 50% sequence identity to the amino acid sequence set forth in any one of SEQ ID NOs:132, 134, 136, 138, 140, 142, 144, 146, or 148; and/or
(d) a tagged polypeptide capable of glycosylating steviol or a steviol glycoside at its C-19 carboxyl group, having at least 55% sequence identity to the amino acid sequence set forth in any one of SEQ ID NOs:174, 176, 178, or 180;
wherein at least one of the polypeptides is a recombinant polypeptide expressed in the recombinant host cell; and producing the one or more steviol glycosides and/or glycosylated steviol precursors, or the composition thereof, thereby;
wherein the one or more steviol glycosides and/or glycosylated steviol precursors are, or the composition thereof comprises 13-SMG, 19-SMG, steviol-1,2-bioside, steviol-1,3-bioside, 1,2-stevioside, 1,3-stevioside, rubusoside, RebA, RebB, RebC, RebD, RebE, RebF, RebM, RebQ, RebI, dulcoside A, a mono-glycosylated ent-kaurenoic acid, a di-glycosylated ent-kaurenoic acid, a tri-glycosylated ent-kaurenoic acid, a mono-glycosylated ent-kaurenols, a di-glycosylated ent-kaurenol, a tri-glycosylated ent-kaurenol, a tri-glycosylated steviol glycoside, a tetra-glycosylated steviol glycoside, a penta-glycosylated steviol glycoside, a hexa-glycosylated steviol glycoside, a hepta-glycosylated steviol glycoside, or an isomer thereof.

27. (canceled)

28. An in vitro method for producing one or more steviol glycosides and/or glycosylated steviol precursors, or a composition thereof comprising adding:
(a) a polypeptide capable of glycosylating steviol or a steviol glycoside at its C-19 carboxyl group having at least 55% sequence identity to the amino acid sequence set forth in SEQ ID NO:4, and further having at least one amino acid substitution corresponding to residues 79, 80, 81, 83, 184, 260, 286, or 377 of SEQ ID NO:4;
(b) a polypeptide capable of glycosylating steviol or a steviol glycoside at its C-19 carboxyl group, having at least 55% sequence identity to the amino acid sequence set forth in SEQ ID NO:4, and further having at least one amino acid substitution corresponding to residues 68, 69, 70, 71, 72, 73, 74, 75, 76, 77, 78, 79, 80, 81, 82, or 83 of SEQ ID NO:4;
(c) a bifunctional polypeptide capable of glycosylating steviol or a steviol glycoside at its C-19 carboxyl group and glycosylating steviol or a steviol glycoside at its C-13 hydroxyl group, having at least 50% sequence identity to the amino acid sequence set forth in any one of SEQ ID NOs:132, 134, 136, 138, 140, 142, 144, 146, or 148; and/or
(d) a tagged polypeptide capable of glycosylating steviol or a steviol glycoside at its C-19 carboxyl group, having at least 55% sequence identity to the amino acid sequence set forth in any one of SEQ ID NOs:174, 176, 178, or 180;
and a plant-derived or synthetic steviol glycoside precursor or a plant-derived or synthetic steviol precursor to a reaction mixture;
wherein at least one of the polypeptides is a recombinant polypeptide; and
producing the one or more steviol glycosides and/or glycosylated steviol precursors, or the composition thereof, thereby
wherein the one or more steviol glycosides and/or glycosylated steviol precursors are, or the composition thereof comprises 13-SMG, 19-SMG, steviol-1,2-bioside, steviol-1,3-bioside, 1,2-stevioside, 1,3-stevioside, rubusoside, RebA, RebB, RebC, RebD, RebE, RebF, RebM, RebQ, RebI, dulcoside A, a mono-glycosylated ent-kaurenoic acid, a di-glycosylated ent-kaurenoic acid, a tri-glycosylated ent-kaurenoic acid, a mono-glycosylated ent-kaurenols, a di-glycosylated ent-kaurenol, a tri-glycosylated ent-kaurenol, a tri-glycosylated steviol glycoside, a tetra-glycosylated steviol glycoside, a penta-glycosylated steviol glycoside, a hexa-glycosylated steviol glycoside, a hepta-glycosylated steviol glycoside, or an isomer thereof.

29-31. (canceled)

32. A cell culture, comprising the recombinant host cell of claim 1, the cell culture further comprising:
(a) the one or more steviol glycosides and/or glycosylated steviol precursors, or the composition thereof produced by the recombinant host cell,
(b) glucose, fructose, sucrose, xylose, rhamnose, UDP-glucose, UDP-rhamnose, UDP-xylose, and/or N-acetyl-glucosamine; and
(c) supplemental nutrients comprising trace metals, vitamins, salts, yeast nitrogen base (YNB), and/or amino acids;
wherein the one or more steviol glycosides and/or glycosylated steviol precursors, or the composition thereof is present at a concentration of at least 1 mg/liter of the cell culture;
wherein the cell culture is enriched for the one or more steviol glycosides and/or glycosylated steviol precursors, or the composition thereof relative to a steviol glycoside composition from a Stevia plant and has a reduced level of Stevia plant-derived components relative to a plant-derived Stevia extract.

33. (canceled)

34. A reaction mixture, comprising:
(a) a polypeptide capable of glycosylating steviol or a steviol glycoside at its C-19 carboxyl group having at least 55% sequence identity to the amino acid sequence set forth in SEQ ID NO:4, and further having at least one amino acid substitution corresponding to residues 79, 80, 81, 83, 184, 260, 286, or 377 of SEQ ID NO:4;
(b) a polypeptide capable of glycosylating steviol or a steviol glycoside at its C-19 carboxyl group, having at least 55% sequence identity to the amino acid sequence set forth in SEQ ID NO:4, and further having at least one amino acid substitution corresponding to residues 68, 69, 70, 71, 72, 73, 74, 75, 76, 77, 78, 79, 80, 81, 82, or 83 of SEQ ID NO:4;
(c) a bifunctional polypeptide capable of glycosylating steviol or a steviol glycoside at its C-19 carboxyl group and glycosylating steviol or a steviol glycoside at its C-13 hydroxyl group, having at least 50% sequence identity to the amino acid sequence set forth in any one of SEQ ID NOs:132, 134, 136, 138, 140, 142, 144, 146, or 148; and/or
(d) a tagged polypeptide capable of glycosylating steviol or a steviol glycoside at its C-19 carboxyl group, having at least 55% sequence identity to the amino acid sequence set forth in any one of SEQ ID NOs:174, 176, 178, or 180;
and further comprising:
(e) one or more steviol glycosides and/or glycosylated steviol precursors, or a composition thereof;
(f) glucose, fructose, sucrose, xylose, rhamnose, uridine diphosphate (UDP)-glucose, UDP-rhamnose, UDP-xylose, and/or N-acetyl-glucosamine; and/or
(g) reaction buffer and/or salts.

35-39. (canceled)

40. An isolated cDNA nucleic acid molecule encoding a polypeptide or a catalytically active portion thereof capable of glycosylating steviol or a steviol glycoside at its C-19 carboxyl group, wherein the encoded polypeptide or the catalytically active portion thereof comprises:
(a) a polypeptide having at least 55% sequence identity to the amino acid sequence set forth in SEQ ID NO:4, and further having at least one amino acid substitution corresponding to residues 79, 80, 81, 83, 184, 260, 286, or 377 of SEQ ID NO:4;
(b) a polypeptide having at least 55% sequence identity to the amino acid sequence set forth in SEQ ID NO:4 and further having at least one amino acid substitution corresponding to residues 68, 69, 70, 71, 72, 73, 74, 75, 76, 77, 78, 79, 80, 81, 82, or 83 of SEQ ID NO:4;
(c) a polypeptide having a M79V, M79E, S80C, A81W, E83K, A81W and E83K, H184V, H184T N260T, K286C, N260T and K286C, K286E, K286N, K286T, and/or S377Q amino acid substitution corresponding to SEQ ID NO:4;
(d) a polypeptide having at least 50% sequence identity to the amino acid sequence set forth in any one of SEQ ID NOs:132, 134, 136, 138, 140, 142, 144, 146, or 148; or
(e) a polypeptide having at least 55% sequence identity to the amino acid sequence set forth in any one of SEQ ID NOs:174, 176, 178, or 180.

41-47. (canceled)

48. A purified polypeptide or a catalytically active portion thereof capable of glycosylating steviol or a steviol glycoside at its C-19 carboxyl group, wherein the polypeptide or the catalytically active portion thereof comprises:
(a) a polypeptide having at least 55% sequence identity to the amino acid sequence set forth in SEQ ID NO:4, and further having at least one amino acid substitution corresponding to residues 79, 80, 81, 83, 184, 260, 286, or 377 of SEQ ID NO:4.
(b) a polypeptide having at least 55% sequence identity to the amino acid sequence set forth in SEQ ID NO:4 and further having at least one amino acid substitution corresponding to residues 68, 69, 70, 71, 72, 73, 74, 75, 76, 77, 78, 79, 80, 81, 82, or 83 of SEQ ID NO:4;
(c) a polypeptide having a M79V, M79E, S80C, A81W, E83K, A81W and E83K, H184V, H184T N260T, K286C, N260T and K286C, K286E, K286N, K286T, and/or S377Q amino acid substitution corresponding to SEQ ID NO:4;
(d) a polypeptide having at least 50% sequence identity to the amino acid sequence set forth in any one of SEQ ID NOs:132, 134, 136, 138, 140, 142, 144, 146, or 148; or
(e) a polypeptide having at least 55% sequence identity to the amino acid sequence set forth in any one of SEQ ID NOs:174, 176, 178, or 180.

49-54. (canceled)
